(19) United States
(12) Patent Application Publication
(10) Pub. No.: US 2025/0320519 A1
(43) Pub. Date: Oct. 16, 2025

(54) SYNTHETIC CIRCULAR RNA COMPOSITIONS AND METHODS OF USE THEREOF

(71) Applicant: SHANGHAI CIRCODE BIOMED CO., LTD., Shanghai (CN)

(72) Inventors: Yun YANG, Shanghai (CN); Zefeng WANG, Shanghai (CN)

(21) Appl. No.: 18/868,935

(22) PCT Filed: May 29, 2023
(86) PCT No.: PCT/CN2023/096813

§ 371 Date: Nov. 25, 2024

(30) Foreign Application Priority Data
May 30, 2022 (WO) PCT/CN2022/095949

(51) Int. Cl. C12N 15/85; A61K 48/00

(52) U.S. Cl. CPC C12N 15/85; A61K 48/00; C12N 2840/203

(57) ABSTRACT

The present disclosure relates to compositions, methods, processes, kits and devices for the selection, design, preparation, manufacture, formulation, and/or use of a polynucleotide having an Internal Ribosome Entry Site (IRES) sequence, an IRES-like sequence or a combination thereof. In particular, the present disclosure relates to compositions, methods, processes, kits and devices for the selection, design, preparation, manufacture, formulation, and/or use of a circular polynucleotide (e.g., a circular RNA). The present disclosure also relates to a method of improving expression, functional stability, immunogenicity, ease of manufacturing and/or half-life of a therapeutic product encoded by the circular RNA.

### 1. RELATED APPLICATIONS

[0001] The application claims priority to, and the benefit of PCT Application No. PCT/CN2022/095949, filed on May 30, 2022, the contents of which are incorporated herein by reference in their entirety.

### 2. INCORPORATION BY REFERENCE OF SEQUENCE LISTING

[0002] The contents of the electronic sequence listing (Family 03_sql_0529.xml; Size: 12,831,515 bytes; and Date of Creation: May 29, 2023) are herein incorporated by reference in its entirety.

### 3. FIELD

[0003] The present disclosure relates to compositions of matters, methods, processes, kits, and devices for the selection, design, preparation, manufacture, formulation, and/or use of a polynucleotide having an Internal Ribosome Entry Site (IRES) sequence, an IRES-like sequence, or a combination thereof. The present disclosure also relates to compositions of matters, methods, processes, kits, and devices for the selection, design, preparation, manufacture, formulation, and/or use of a circular polynucleotide (e.g., a circular RNA) comprising the IRES, sequence, IRES-like sequence, or a combination thereof. In addition, the present disclosure relates to methods of improving expression, functional stability, immunogenicity, manufacturing, and/or half-life of a therapeutic product encoded by the circular RNA.

### 4. BACKGROUND

[0004] Gene therapy and genetic vaccination provide highly specific and individualized therapy options for a large variety of diseases such as inherited genetic diseases, autoimmune diseases, cancer, and inflammatory diseases. In the context of gene therapy and genetic vaccination, DNA as well as RNA may be used as nucleic acid molecules for administration. While DNA therapies are stable and easily manipulated, there is a risk of undesirable consequences, such as genomic integration and generation of anti-DNA antibodies. Further, there may be limited expression of the encoded protein due the dependency on the presence of specific transcription factors, which regulate DNA transcription. In the absence of such factors, DNA transcription is hindered, which in turn results in low levels of translated protein.

[0005] By using RNA instead of DNA genetic therapies, the risk of undesirable consequences, such as genomic integration and generation of anti-DNA antibodies, is minimized or avoided. In particular, circular RNA is useful in the design and production of stable forms of RNA. Circular RNA is also useful for in vivo applications, especially in areas of RNA-based control of gene expression, protein manufacture, and therapeutics, including protein replacement therapy and vaccination.

[0006] Translation of circular RNA is facilitated by cap-independent translation. Thus, the design and selection of suitable cap-independent translation initiation elements is important for the control of protein expression. Internal ribosome entry site (IRES) elements are useful for cap-independent gene expression eukaryotic cells. However, naturally found IRES elements may 1) have a large length of nucleic acid residues, 2) contain complex secondary structures, and/or 3) be prone to host cell immune rejection, each of which is not preferable for in vivo applications, such as protein replacement therapies.

[0007] While numerous natural IRES sequences shown to promote cap-independent translation have been identified, the identification and development of novel IRES elements has been occasional and accidental. Natural IRES elements do not allow for fine-tuned control of protein expression and few systematic methodologies for prediction of functional novel IRES elements have been shown. Systematic approaches for the identification and development of synthetically generated IRES elements that are capable of providing efficient cap-independent protein expression have not been shown.

[0008] Therefore, there exists a need in the art for approaches and methodologies for developing synthetic IRES elements, and for methodologies in predicting and controlling the efficiency of protein expression from a synthetic IRES element. There also exists a need in the art for providing polynucleotides (e.g., circular RNA) having synthetic IRES elements that may be suitable for use as a medicament or vaccine, such as for application in gene therapy and/or genetic vaccination. The present disclosure addresses these unmet needs.

### 5. SUMMARY

[0009] Compositions of matters (e.g., synthetic Internal Ribosome Entry Site (IRES) sequences, IRES-like sequences, or combinations thereof, and circular RNAs) and methods are described for the selection, design, preparation, manufacture, formulation, and/or use of a polynucleotide having an IRES sequence, an IRES-like sequence, or a combination thereof, and a circular RNA, as described herein.

[0010] Provided herein is an RNA polynucleotide comprising a construct of Formula I:

[chemical structure]

[0011] wherein:
[0012] TI is an engineered translation initiation element comprising an IRES-like polynucleotide sequence, wherein the IRES-like polynucleotide sequence comprises the nucleic acid sequence of about or at least about 90%, 95%, 97%, 98%, 99% or 100% identical to SEQ ID NO: 1025-14161 or 14412-15341;
[0013] Z1 is an expression sequence encoding a therapeutic product;
[0014] each L is independently a linker sequence;
[0015] A1 and B1 are each independently a sequences capable of circularizing the RNA polynucleotide, or
[0016] A1 and B1 each independently comprise a nucleotide derivative capable of joining the 5′ end and the 3′ end via a 3′ to 5′ phosphodiester linkage for circularization of the RNA polynucleotide; and
[0017] n is an integer selected from 0 to 2.

[0018] Also provided herein is an RNA polynucleotide comprising a construct of Formula II:

[chemical structure]

wherein:
[0019] TI is an engineered translation initiation element comprising an IRES-like polynucleotide sequence, wherein the IRES-like polynucleotide sequence comprises the nucleic acid sequence of about or at least about 90%, 95%, 97%, 98%, 99% or 100% identical to SEQ ID NO: 1025-14161 or 14412-15341;
[0020] Z1_{A} is a first portion of an expression sequence encoding a therapeutic product;
[0021] Z1_{B} is a second portion of the expression sequence encoding the therapeutic product;
[0022] each L is independently a linker sequence;
[0023] A1 and B1 are each independently a sequence capable of circularizing the RNA polynucleotide, or
[0024] A1 and B1 each independently comprise a nucleotide derivative capable of joining the 5′ end and the 3′ end via a 3′ to 5′ phosphodiester linkage for circularization of the RNA polynucleotide; and
[0025] n is an integer selected from 0 to 2.

[0026] Also provided herein is an RNA polynucleotide comprising a construct of Formula III:

[chemical structure]

wherein:
[0027] TI is an engineered translation initiation element comprising an IRES-like polynucleotide sequence, wherein the IRES-like polynucleotide sequence comprises the nucleic acid sequence of about or at least about 90%, 95%, 97%, 98%, 99% or 100% identical to SEQ ID NO: 1025-14161 or 14412-15341;
[0028] Z1 is an expression sequence encoding a therapeutic product;
[0029] each L is independently a linker sequence;
[0030] the 5′ intron fragment and the 3′ intron fragment are each a fragment of a group II intron, wherein the 5′ intron fragment is located on the 5′ side of the 3′ intron fragment in the group II intron;
[0031] the E1 is a 5′ adjacent exon fragment of the group II intron, which is ≥0 nucleotides in length;
[0032] the E2 is a 3′ adjacent exon fragment of the group II intron, which is ≥0 nucleotides in length; and
[0033] n is an integer selected from 0 to 2.

[0034] Also provided herein is an RNA polynucleotide comprising a construct of Formula IV:

5′-(3′ intron fragment)-(E2)-(L)ₙ-Z1_{B}-(L)ₙ-TI-(L)ₙ-Z1_{A-}-(L)ₙ-(E1)-(5′ intron fragment)-3′ (IV)

wherein:
[0035] TI is an engineered translation initiation element comprising an IRES-like polynucleotide sequence, wherein the IRES-like polynucleotide sequence comprises the nucleic acid sequence of about or at least about 90%, 95%, 97%, 98%, 99% or 100% identical to SEQ ID NO: 1025-14161 or 14412-15341;
[0036] Z1_{A} is a first portion of an expression sequence encoding a therapeutic product;
[0037] Z1_{B} is a second portion of the expression sequence encoding the therapeutic product;
[0038] each L is independently a linker sequence;
[0039] the 5′ intron fragment and the 3′ intron fragment are each a fragment of a group II intron, wherein the 5′ intron fragment is located on the 5′ side of the 3′ intron fragment in the group II intron;
[0040] the E1 is a 5′ adjacent exon fragment of the group II intron, which is ≥0 nucleotides in length;
[0041] the E2 is a 3′ adjacent exon fragment of the group II intron, which is ≥0 nucleotides in length; and
[0042] n is an integer selected from 0 to 2.

[0043] Also provided herein is an RNA polynucleotide comprising a construct of Formula V,

[chemical structure]

wherein:
[0044] TI is an engineered translation initiation element comprising an IRES-like polynucleotide sequence, wherein the IRES-like polynucleotide sequence comprises the nucleic acid sequence of about or at least about 90%, 95%, 97%, 98%, 99% or 100% identical to SEQ ID NO: 1025-14161 or 14412-15341;
[0045] Z1 is an expression sequence encoding a therapeutic product;
[0046] each L is independently a linker sequence; and
[0047] n is an integer selected from 0 to 2.

[0048] Also provided herein is an RNA polynucleotide comprising an engineered translation initiation element (TI) comprising an IRES-like polynucleotide sequence, wherein the IRES-like polynucleotide sequence comprises the nucleic acid sequence of about or at least about 90%, 95%, 97%, 98%, 99% or 100% identical to SEQ ID NO: 1025-14161 or 14412-15341.

[0049] Also provided herein is an RNA polynucleotide comprising a construct of Formula I, Formula II, Formula III, Formula IV, or Formula V:

[chemical structure]

wherein:
[0050] TI is an engineered translation initiation element comprising an IRES-like polynucleotide sequence, wherein the IRES-like polynucleotide sequence comprises the nucleic acid sequence of about or at least about 90%, 95%, 97%, 98%, 99% or 100% identical to SEQ ID NO: 1025-14161 or 14412-15341;
[0051] Z1 is an expression sequence encoding a therapeutic product;
[0052] Z1_{A} is a first portion of an expression sequence encoding a therapeutic product;
[0053] Z1_{B} is a second portion of the expression sequence encoding the therapeutic product;
[0054] each L is independently a linker sequence;
[0055] A1 and B1 are each independently a sequences capable of circularizing the RNA polynucleotide, or
[0056] A1 and B1 each independently comprise a nucleotide derivative capable of joining the 5′ end and the 3′ end via a 3′ to 5′ phosphodiester linkage for circularization of the RNA polynucleotide;
[0057] the 5′ intron fragment and the 3′ intron fragment are each a fragment of a group II intron, wherein the 5′ intron fragment is located on the 5′ side of the 3′ intron fragment in the group II intron;
[0058] the E1 is a 5′ adjacent exon fragment of the group II intron, which is ≥0 nucleotides in length;
[0059] the E2 is a 3′ adjacent exon fragment of the group II intron, which is ≥0 nucleotides in length; and
[0060] n is an integer selected from 0 to 2.

[0061] Provided herein is a method for generating an Internal Ribosome Entry Site (IRES)-like polynucleotide sequence, the method comprising the steps of:
[0062] (a) generating a polynucleotide query sequence consisting of X nucleic acid residues in length, wherein X is an integer greater than or equal to 3;
[0063] (b) generating X−Y+1 number of overlapping polynucleotide fragment sequences within the polynucleotide query sequence,
[0064] wherein each polynucleotide fragment sequence consists of Y nucleic acid residues in length,
[0065] wherein the first position of each polynucleotide fragment sequence is n and the last position of the same polynucleotide fragment sequence is Y+n−1, and
[0066] wherein n represents each positive integer between 1 and X−Y+1;
[0067] (c) determining an enrichment score for each polynucleotide fragment sequence of (b);
[0068] (d) determining a numerical score for the polynucleotide query sequence by summing the enrichment scores of each polynucleotide fragment sequence of (c); and
[0069] (e) identifying the polynucleotide query sequence as an engineered IRES-like polynucleotide sequence according to a reference value.

[0070] Provided herein is a method of determining an enrichment score for a polynucleotide fragment sequence, comprising
[0071] i) generating an expression plasmid library, wherein each expression plasmid of the library comprises a different polynucleotide fragment sequence and a reporter gene;
[0072] ii) contacting a population of cells with the expression plasmid library;
[0073] iii) quantifying the expression level of the reporter gene corresponding to each expression plasmid of the expression plasmid library;
[0074] iv) dividing the total population of cells into a first population and a second population based on the protein expression levels of iii);
[0075] v) determining an enrichment score for the polynucleotide fragment sequence using the following system of equations:

$$\begin{matrix}Score = \frac{{f}_{1} - {f}_{2}}{\sqrt{( \frac{1}{{N}_{1}} + \frac{1}{{N}_{2}} ) P ( 1 - P )}} \\ P = \frac{{N}_{1} {f}_{1} - {N}_{2} {f}_{2}}{{N}_{1} + {N}_{2}}\end{matrix}$$

[0076] wherein f₁ is the frequency of the polynucleotide fragment sequence in the first population,
[0077] wherein f₂ is the frequency of the same polynucleotide fragment sequence in the second population,
[0078] wherein N₁ is the size of the first population, and
[0079] wherein N₂ is the size of the second population.

[0080] Provided herein is an RNA polynucleotide comprising an engineered translation initiation element (TI), wherein the TI comprises an Internal Ribosome Entry Site (IRES)-like polynucleotide sequence generated by the method of the present disclosure.

[0081] Provided herein is a polypeptide expressed by the RNA polynucleotide of the present disclosure, a DNA vector encoding or suitable for synthesizing the RNA polynucleotide of the present disclosure, a cell comprising the RNA polynucleotide, polypeptide, or DNA vector of the present disclosure, and a composition comprising the RNA polynucleotide, polypeptide, DNA vector, or cell of the present disclosure, and a pharmaceutically acceptable carrier, and a method of making the same.

[0082] Provided herein is a method of modulating the expression of a protein in a subject in need thereof, comprising administering to the subject a therapeutically effective amount of the RNA polynucleotide, polypeptide, DNA vector, or cell of the present disclosure.

[0083] Provided herein is a method of treating or preventing a disease or disorder in a subject in need thereof, comprising administering to the subject a therapeutically effective amount of the RNA polynucleotide, polypeptide, DNA vector, or cell of the present disclosure.

[0084] Provided herein is use of the RNA polynucleotide, polypeptide, DNA vector, or cell of the present disclosure in the manufacture of a medicament for modulating the expression of a protein or treating or preventing a disease or disorder in a subject in need thereof.

[0085] Provided herein is an RNA polynucleotide, polypeptide, DNA vector, or cell of the present disclosure for modulating the expression of a protein or treating or preventing a disease or disorder in a subject in need thereof.

[0086] In some embodiments, nucleic acids (e.g., polynucleotides) and nucleic acid sequences disclosed herein may be codon-optimized (e.g., for the expression of the therapeutic product), for example, via any codon-optimization technique known in the art (see, e.g., Quax et al., 2015, Mol Cell 59: 149-161).

### 6. ILLUSTRATIVE EMBODIMENTS

### Embodiment 1

[0087] An RNA polynucleotide comprising a construct of Formula I:

[chemical structure]

wherein:
[0088] TI is an engineered translation initiation element comprising an IRES-like polynucleotide sequence, wherein the IRES-like polynucleotide sequence comprises the nucleic acid sequence of about or at least about 90%, 95%, 97%, 98%, 99% or 100% identical to SEQ ID NO: 1025-14161 or 14412-15341;
[0089] Z1 is an expression sequence encoding a therapeutic product;
[0090] each L is independently a linker sequence;
[0091] A1 and B1 are each independently a sequence capable of circularizing the RNA polynucleotide, or
[0092] A1 and B1 each independently comprise a nucleotide derivative capable of joining the 5′ end and the 3′ end via a 3′ to 5′ phosphodiester linkage for circularization of the RNA polynucleotide; and
[0093] n is an integer selected from 0 to 2.

### Embodiment 1-1

[0094] An RNA polynucleotide comprising a construct of Formula I-1:

[chemical structure]

wherein:
[0095] TI is an engineered translation initiation element comprising an IRES-like polynucleotide sequence, wherein the IRES-like polynucleotide sequence comprises the nucleic acid sequence of about or at least about 90%, 95%, 97%, 98%, 99% or 100% identical to SEQ ID NO: 1025-14161 or 14412-15341;
[0096] Z1 is an expression sequence encoding a therapeutic product;
[0097] each L is independently a linker sequence;
[0098] A1 and B1 are each independently a sequence capable of circularizing the RNA polynucleotide; and
[0099] n is an integer selected from 0 to 2.

### Embodiment 1-2

[0100] An RNA polynucleotide comprising a construct of Formula 1-2:

[chemical structure]

wherein:
[0101] TI is an engineered translation initiation element comprising an IRES-like polynucleotide sequence, wherein the IRES-like polynucleotide sequence comprises the nucleic acid sequence of about or at least about 90%, 95%, 97%, 98%, 99% or 100% identical to SEQ ID NO: 1025-14161 or 14412-15341;
[0102] Z1 is an expression sequence encoding a therapeutic product;
[0103] each L is independently a linker sequence;
[0104] A1 and B1 each independently comprise a nucleotide derivative capable of joining the 5′ end and the 3′ end via a 3′ to 5′ phosphodiester linkage for circularization of the RNA polynucleotide; and
[0105] n is an integer selected from 0 to 2.

### Embodiment 2

[0106] An RNA polynucleotide comprising a construct of Formula II:

[chemical structure]

wherein:
[0107] TI is an engineered translation initiation element comprising an IRES-like polynucleotide sequence, wherein the IRES-like polynucleotide sequence comprises the nucleic acid sequence of about or at least about 90%, 95%, 97%, 98%, 99% or 100% identical to SEQ ID NO: 1025-14161 or 14412-15341;
[0108] Z1_{A} is a first portion of an expression sequence encoding a therapeutic product;
[0109] Z1_{B} is a second portion of the expression sequence encoding the therapeutic product;
[0110] each L is independently a linker sequence;
[0111] A1 and B1 are each independently a sequence capable of circularizing the RNA polynucleotide, or
[0112] A1 and B1 each independently comprise a nucleotide derivative capable of joining the 5′ end and the 3′ end via a 3′ to 5′ phosphodiester linkage for circularization of the RNA polynucleotide; and
[0113] n is an integer selected from 0 to 2.

### Embodiment 2-1

[0114] An RNA polynucleotide comprising a construct of Formula II-1:

[chemical structure]

wherein:
[0115] TI is an engineered translation initiation element comprising an IRES-like polynucleotide sequence, wherein the IRES-like polynucleotide sequence comprises the nucleic acid sequence of about or at least about 90%, 95%, 97%, 98%, 99% or 100% identical to SEQ ID NO: 1025-14161 or 14412-15341;
[0116] Z1_{A} is a first portion of an expression sequence encoding a therapeutic product;
[0117] Z1_{B} is a second portion of the expression sequence encoding the therapeutic product;
[0118] each L is independently a linker sequence;
[0119] A1 and B1 are each independently a sequence capable of circularizing the RNA polynucleotide; and
[0120] n is an integer selected from 0 to 2.

### Embodiment 2-2

[0121] An RNA polynucleotide comprising a construct of Formula II-2:

[chemical structure]

wherein:
[0122] TI is an engineered translation initiation element comprising an IRES-like polynucleotide sequence, wherein the IRES-like polynucleotide sequence comprises the nucleic acid sequence of about or at least about 90%, 95%, 97%, 98%, 99% or 100% identical to SEQ ID NO: 1025-14161 or 14412-15341;
[0123] Z1_{A} is a first portion of an expression sequence encoding a therapeutic product;
[0124] Z1_{B} is a second portion of the expression sequence encoding the therapeutic product;
[0125] each L is independently a linker sequence;
[0126] A1 and B1 each independently comprise a nucleotide derivative capable of joining the 5′ end and the 3′ end via a 3′ to 5′ phosphodiester linkage for circularization of the RNA polynucleotide; and
[0127] n is an integer selected from 0 to 2.

### Embodiment 3

[0128] An RNA polynucleotide comprising a construct of Formula III:

[chemical structure]

wherein:
[0129] TI is an engineered translation initiation element comprising an IRES-like polynucleotide sequence, wherein the IRES-like polynucleotide sequence comprises the nucleic acid sequence of about or at least about 90%, 95%, 97%, 98%, 99% or 100% identical to SEQ ID NO: 1025-14161 or 14412-15341;
[0130] Z1 is an expression sequence encoding a therapeutic product;
[0131] each L is independently a linker sequence;
[0132] the 5′ intron fragment and the 3′ intron fragment are each a fragment of a group II intron, wherein the 5′ intron fragment is located on the 5′ side of the 3′ intron fragment in the group II intron;
[0133] the E1 is a 5′ adjacent exon fragment of the group II intron, which is ≥0 nucleotides in length;
[0134] the E2 is a 3′ adjacent exon fragment of the group II intron, which is ≥0 nucleotides in length; and
[0135] n is an integer selected from 0 to 2.

### Embodiment 4

[0136] An RNA polynucleotide comprising a construct of Formula IV:

[chemical structure]

wherein:
[0137] TI is an engineered translation initiation element comprising an IRES-like polynucleotide sequence, wherein the IRES-like polynucleotide sequence comprises the nucleic acid sequence of about or at least about 90%, 95%, 97%, 98%, 99% or 100% identical to SEQ ID NO: 1025-14161 or 14412-15341;
[0138] Z1_{A} is a first portion of an expression sequence encoding a therapeutic product;
[0139] Z1_{B} is a second portion of the expression sequence encoding the therapeutic product;
[0140] each L is independently a linker sequence;
[0141] the 5′ intron fragment and the 3′ intron fragment are each a fragment of a group II intron, wherein the 5′ intron fragment is located on the 5′ side of the 3′ intron fragment in the group II intron;
[0142] the E1 is a 5′ adjacent exon fragment of the group II intron, which is ≥0 nucleotides in length;
[0143] the E2 is a 3′ adjacent exon fragment of the group II intron, which is ≥0 nucleotides in length; and
[0144] n is an integer selected from 0 to 2.

### Embodiment 5

[0145] The RNA polynucleotide of Embodiment 3 or 4, further comprising a 5′ homology arm at the 5′ end of the 3′ intron fragment.

### Embodiment 6

[0146] The RNA polynucleotide of Embodiment 3 or 4, further comprising a 3′ homology arm at the 3′ end of the 5′ intron fragment.

### Embodiment 7

[0147] The RNA polynucleotide of Embodiment 3 or 4, further comprising a 5′ homology arm at the 5′ end of the 3′ intron fragment, and a 3′ homology arm at the 3′ end of the 5′ intron fragment.

### Embodiment 8

[0148] The RNA polynucleotide of any one of Embodiments 3-7, wherein the E1 and the E2 are each independently 0 to 20 nucleotides in length, preferably 0 to 10 nucleotides in length, such as 0, 1, 2, 3, 4, 5, 6, 7, 8, 9 or 10 nucleotides.

### Embodiment 9

[0149] The RNA polynucleotide of any one of Embodiments 3-8, wherein the 5′ intron fragment and the 3′ intron fragment are obtained by segmenting a group II intron at an unpaired region into two fragments, wherein the unpaired region is preferably selected from a linear region between two adjacent domains of the group II intron and a loop region of a stem-loop structure of domain 4 of the group II intron.

### Embodiment 10

[0150] An RNA polynucleotide comprising a construct of Formula IV,

[chemical structure]

wherein:
[0151] TI is an engineered translation initiation element comprising an IRES-like polynucleotide sequence, wherein the IRES-like polynucleotide sequence comprises the nucleic acid sequence of about or at least about 90%, 95%, 97%, 98%, 99% or 100% identical to SEQ ID NO: 1025-14161 or 14412-15341;
[0152] Z1 is an expression sequence encoding a therapeutic product;
[0153] each L is independently a linker sequence; and
[0154] n is an integer selected from 0 to 2.

### Embodiment 11

[0155] An RNA polynucleotide comprising an engineered translation initiation element (TI) comprising an IRES-like polynucleotide sequence, wherein the IRES-like polynucleotide sequence comprises the nucleic acid sequence of about or at least about 90%, 95%, 97%, 98%, 99% or 100% identical to SEQ ID NO: 1025-14161 or 14412-15341.

### Embodiment 12

[0156] The RNA polynucleotide any one of Embodiments 1-11, wherein the RNA polynucleotide is circularized via a ligation reaction.

### Embodiment 13

[0157] The RNA polynucleotide of Embodiment 12, wherein the RNA polynucleotide is circularized in the presence of a T4 ligase.

### Embodiment 14

[0158] The RNA polynucleotide of Embodiment 12, wherein the RNA polynucleotide is circularized in the absence of a T4 ligase.

### Embodiment 15

[0159] The RNA polynucleotide of any one of Embodiments 1-11, wherein the RNA polynucleotide is circularized via a splicing reaction.

### Embodiment 16

[0160] The RNA polynucleotide of Embodiment 15, wherein the RNA polynucleotide is circularized in the presence of a spliceosome.

### Embodiment 17

[0161] The RNA polynucleotide of Embodiment 15, wherein the RNA polynucleotide is circularized in the absence of a spliceosome.

### Embodiment 18

[0162] The RNA polynucleotide of any one of Embodiments 1-11, wherein the RNA polynucleotide is circularized via a self-splicing reaction.

### Embodiment 19

[0163] The RNA polynucleotide of any one of Embodiments 1-18, wherein the IRES-like polynucleotide sequence is between 6-12 residues in length.

### Embodiment 20

[0164] The RNA polynucleotide of any one of Embodiments 1-19, wherein the TI further comprises a second IRES-like polynucleotide sequence.

### Embodiment 20-1

[0165] The RNA polynucleotide of Embodiment 20, wherein the first IRES-like polynucleotide sequence and the second IRES-like polynucleotide sequence are the same.

### Embodiment 20-2

[0166] The RNA polynucleotide of Embodiment 20, wherein the first IRES-like polynucleotide sequence and the second IRES-like polynucleotide sequence are the different.

### Embodiment 21

[0167] The RNA polynucleotide of Embodiment 20, 20-1, or 20-2, wherein the second IRES-like polynucleotide sequence comprises the nucleic acid sequence of about or at least about 90%, 95%, 97%, 98%, 99% or 100% identical to SEQ ID NO: 1025-14161 or 14412-15341.

### Embodiment 22

[0168] The RNA polynucleotide of any one of Embodiments 1-21, wherein the TI further comprises a natural IRES sequence. The RNA polynucleotide of any one of Embodiments 1-21, wherein the TI further comprises an IRES sequence that is isolated or derived from a natural IRES sequence.

### Embodiment 23

[0169] The RNA polynucleotide of any one of Embodiments 1-22, wherein the IRES sequence is an RNA sequence capable of engaging a eukaryotic ribosome.

[0170] In some embodiments, the natural IRES sequence is an endogenous IRES sequence which is isolated or derived from Homo sapiens. In some embodiment, the natural IRES sequence is an endogenous IRES sequence which is isolated or derived from human tissue or human sample.

[0171] In some embodiments, the natural IRES sequence is isolated or derived from the IRES sequence of a virus, a mammal, and a Drosophila.

[0172] In some embodiments, the natural IRES sequence is isolated or derived from a picomavirus complementary DNA (cDNA), a encephalomyocarditis virus (EMCV) cDNA, poliovirus cDNA, ABPV IGRpred, AEV, ALPV IGRpred, BQCV IGRpred, BVDV1 1-385, BVDV1 29-391, CrPV 5NCR, CrPV IGR, crTMV IREScp, crTMV_IRESmp75, crTMV_IRESmp228, crTMV IREScp, crTMV IREScp, CSFV, CVB3, DCV IGR, EMCV-R, EoPV_5NTR, ERAV_245-961, ERBV_162-920, EV71_1-748, FeLV-Notch2, FMDV type C, GBV-A, GBV-B, GBV-C, gypsy_env, gypsyD5, gypsyD2, HAV HM175, HCV type 1a, HiPVJGRpred, HIV-1, HoCV1JGRpred, HRV-2, IAPVJGRpred, idefix, KBV IGRpred, LINE-1_ORF1_-1O1_to_-I, LINE-1_ORF1_-302_to_-202, LINE-1_ORF2_-138_to_-86, LINE-1_ORF1_-44_to_-1, PSIV IGR, PV type1 Mahoney, PV_type3_Leon, REV-A, RhPV 5NCR, RhPV IGR, SINV1 IGRpred, SV40 661-830, TMEV, TMV_UI_IRESmp228, TRV 5NTR, TrV IGR, or TSV IGR sequence.

[0173] In some embodiments, the natural IRES sequence of a Drosophila is an Antennapedia gene of Drosophila melanogaster.

[0174] In some embodiments, the natural IRES sequence is isolated or derived from a AML1/RUNX1, Antp-D, Antp-DE, Antp-CDE, Apaf-1, Apaf-1, AQP4, AT1R var1, AT1R_var2, AT1R_var3, AT1R_var4, BAG1_p36delta236nt, BAG1_p36, BCL2, BiP_-222_-3, C-IAP1 285-1399, cIAP1 13 13-1462, c-jun, c-myc, Cat-I_224, CCND1, DAP5, eIF4G, eIF4GI-ext, eIF4GII, eIF4GII-long, ELG1, ELH, FGF1A, FMR1, Gtx-133-141, Gtx-1-166, Gtx-1-120, Gtx-1-196, hairless, HAP4, HIF1a, hSNM1, Hsp1O1, hsp70, hsp70, Hsp90, IGF2_leader2, Kv1.4_1.2, L-myc, LamB1-335-1, LEF1, MNT 75-267, MNT 36-160, MTG8a, MYB, MYT2 997-1 152, n-MYC, NDST1, NDST2, NDST3, NDST4L, NDST4S, NRF_-653_-17, NtHSF1, ODC1, p27kip1, p53_128-269, PDGF2/c-sis, Pim-1, PITSLRE_p58, Rbm3, reaper, Scamper, TFIID, TIF4631, Ubx_1-966, Ubx_373-961, UNR, Ure2, UtrA, VEGF-A-133-1, XIAP 5-464, XIAP 305-466, or YAP1 sequence.

[0175] In some embodiments, the natural IRES sequence is isolated or derived from a synthetic (GAAA)16, (PPT19)4, KMI1, KMI1, KMI2, KMI2, KMIX, XI, or X2 IRES sequence.

### Embodiment 24

[0176] The RNA polynucleotide of any one of Embodiments 1-23, wherein the L comprises a 5′UTR, 3′UTR, poly-A sequence, polyA-C sequence, poly-C sequence, poly-U sequence, poly-G sequence, ribosome binding site, aptamer, riboswitch, ribozyme, small RNA binding site, translation regulation elements (e.g. a Kozak sequence), a protein binding site (e.g. PTBP1 or HUR) a non-natural nucleotide, or a non-nucleotide chemical-linker.

### Embodiment 25

[0177] The RNA polynucleotide of any one of Embodiments 1-24, wherein the L is about 3 to about 100 nucleotide residues in length.

### Embodiment 26

[0178] The RNA polynucleotide of any one of Embodiments 1-25, wherein the L comprises the nucleic acid sequence of RCC, wherein R is a guanine or an adenine.

### Embodiment 27

[0179] The RNA polynucleotide of any one of Embodiments 1-26, wherein the RNA polynucleotide is a single stranded RNA polynucleotide.

### Embodiment 28

[0180] The RNA polynucleotide of any one of Embodiments 1-27, wherein the RNA polynucleotide is a circular RNA polynucleotide.

### Embodiment 29

[0181] The RNA polynucleotide of any one of Embodiments 1-27, wherein the RNA polynucleotide is a linear RNA polynucleotide.

### Embodiment 30

[0182] The RNA polynucleotide of any one of Embodiments 1-29, wherein the RNA polynucleotide is capable of circularizing in the absence of an enzyme.

### Embodiment 31

[0183] The RNA polynucleotide of any one of Embodiments 1-30, wherein the RNA polynucleotide is an isolated RNA polynucleotide or a synthetic RNA polynucleotide.

### Embodiment 32

[0184] A polypeptide expressed by the RNA polynucleotide of any one of Embodiments 1-31.

### Embodiment 33

[0185] A DNA vector encoding the RNA polynucleotide of any one of Embodiments 1-31.

### Embodiment 34

[0186] A DNA vector suitable for synthesizing the RNA polynucleotide of any one of Embodiments 1-31.

### Embodiment 35

[0187] A cell comprising the RNA polynucleotide of any one of Embodiments 1-31, the polypeptide of Embodiment 32, or the DNA vector of Embodiment 33 or 34.

### Embodiment 36

[0188] A composition comprising the RNA polynucleotide of any one of Embodiments 1-31, the polypeptide of Embodiment 32, the DNA vector of Embodiment 33 or 34, or the cell of Embodiment 35, and a pharmaceutically acceptable carrier.

### Embodiment 37

[0189] A method of making a population of cells comprising contacting the cells of the population with the RNA polynucleotide of any one of Embodiments 1-31, the polypeptide of Embodiment 32, or the DNA vector of Embodiment 33 or 34.

### Embodiment 38

[0190] A method for generating an Internal Ribosome Entry Site (IRES)-like polynucleotide sequence, the method comprising the steps of:
[0191] (a) generating a polynucleotide query sequence consisting of X nucleic acid residues in length, wherein X is an integer greater than or equal to 3;
[0192] (b) generating X−Y+1 number of overlapping polynucleotide fragment sequences within the polynucleotide query sequence,
[0193] wherein each polynucleotide fragment sequence consists of Y nucleic acid residues in length,
[0194] wherein the first position of each polynucleotide fragment sequence is n and the last position of the same polynucleotide fragment sequence is Y+n−1, and
[0195] wherein n represents each positive integer between 1 and X−Y+1;
[0196] (c) determining an enrichment score for each polynucleotide fragment sequence of (b);
[0197] (d) determining a numerical score for the polynucleotide query sequence by summing the enrichment scores of each polynucleotide fragment sequence of (c); and
[0198] (e) identifying the polynucleotide query sequence as an engineered IRES-like polynucleotide sequence according to a reference value.

### Embodiment 38-1

[0199] The method of Embodiment 38, wherein the reference value is calculated according to the following formula: Reference Value=(23.75*X)−84.85−Z, wherein Z represents any number between 1 and 10000 and X represents the length of IRES-like polynucleotide sequence.

### Embodiment 38-2

[0200] The method of Embodiment 38-1, wherein Z represents any number between 50 and 5000.

### Embodiment 38-3

[0201] The method of Embodiment 38-1, wherein Z represents any number between 175 and 2500.

### Embodiment 38-4

[0202] The method of Embodiment 38-1, wherein Z represents any number between 150 and 200.

### Embodiment 39

[0203] The method of Embodiment 38, wherein the reference value is characteristic of the absence of a therapeutic product expression.

### Embodiment 40

[0204] The method of Embodiment 38, wherein the reference value is the mean score of all of the numerical scores of two or more IRES-like polynucleotide sequences or two or more natural IRES sequence or a combination thereof.

### Embodiment 41

[0205] The method of Embodiment 38, wherein the reference value is the average score of all of the numerical scores of two or more IRES-like polynucleotide sequences or two or more natural IRES sequence or a combination thereof.

### Embodiment 42

[0206] The method of Embodiment 38, wherein the reference value is about 95%, about 90%, about 85%, about 80%, about 75%, about 70%, about 65%, about 60%, about 55%, about 50%, about 45%, about 40%, about 35%, about 30%, about 25%, about 20%, about 15%, about 10%, about 9%, about 8%, about 7%, about 6%, about 5%, about 4%, about 3%, about 2%, about 1%, about 0.9%, about 0.8%, about 0.7%, about 0.6%, about 0.5%, about 0.4%, about 0.3%, about 0.2%, or about 0.1% of the highest numerical score of two or more IRES-like polynucleotide sequences or two or more natural IRES sequence or a combination thereof.

### Embodiment 43

[0207] The method of Embodiment 38, wherein the reference value is about 50%, about 45%, about 40%, about 35%, about 30%, about 25%, about 20%, about 15%, or about 10% of the highest numerical score of two or more IRES-like polynucleotide sequences or two or more natural IRES sequence or a combination thereof.

### Embodiment 44

[0208] The method of Embodiment 38, wherein the reference value is at least about 95%, about 90%, about 85%, about 80%, about 75%, about 70%, about 65%, about 60%, about 55%, about 50%, about 45%, about 40%, about 35%, about 30%, about 25%, about 20%, about 15%, about 10%, about 9%, about 8%, about 7%, about 6%, about 5%, about 4%, about 3%, about 2%, about 1%, about 0.9%, about 0.8%, about 0.7%, about 0.6%, about 0.5%, about 0.4%, about 0.3%, about 0.2%, or about 0.1% higher than the lowest numerical score of two or more IRES-like polynucleotide sequences or two or more natural IRES sequence or a combination thereof.

### Embodiment 45

[0209] The method of Embodiment 38, wherein the reference value is at least about 95%, about 90%, about 85%, about 80%, about 75%, about 70%, about 65%, about 60%, about 55%, about 50% higher than the lowest numerical score of two or more IRES-like polynucleotide sequences or two or more natural IRES sequence or a combination thereof.

### Embodiment 46

[0210] The method of Embodiment 38, wherein the reference value is greater than or equal to 0.

### Embodiment 47

[0211] The method of any one of Embodiments 38-46, wherein X is an integer selected from 3-300.

### Embodiment 48

[0212] The method of any one of Embodiments 38-47, wherein X is an integer selected from 3-100.

### Embodiment 49

[0213] The method of any one of Embodiments 38-48, wherein X is an integer selected from 5-100.

### Embodiment 50

[0214] The method of any one of Embodiments 38-49, wherein X is an integer selected from 6-100.

### Embodiment 51

[0215] The method of any one of Embodiments 38-50, wherein X is an integer greater than or equal to 5.

### Embodiment 52

[0216] The method of any one of Embodiments 38-51, wherein X is an integer greater than or equal to 6.

### Embodiment 53

[0217] The method of any one of Embodiments 38-52, wherein the polynucleotide query sequence is generated within a DNA vector suitable for synthesizing the polynucleotide query sequence.

### Embodiment 54

[0218] The method of any one of Embodiments 38-53, wherein the polynucleotide query sequence is chemically synthesized.

### Embodiment 55

[0219] The method of any one of Embodiments 38-54, wherein the overlapping polynucleotide fragment sequences within the polynucleotide query sequence are 5, 6, 7, 8, 9 or 10 nucleic acid residues in length.

### Embodiment 56

[0220] The method of any one of Embodiments 38-55, wherein the enrichment score for a polynucleotide fragment sequence is determined by:
[0221] i) generating a expression plasmid library, wherein each expression plasmid of the library comprises a different polynucleotide fragment sequence and a reporter gene;
[0222] ii) contacting a population of cells with the expression plasmid library;
[0223] iii) quantifying the expression level of the reporter gene corresponding to each expression plasmid of the expression plasmid library;
[0224] iv) dividing the total population of cells into a first population and a second population based on the protein expression levels of iii);
[0225] v) determining an enrichment score for the polynucleotide fragment sequence using the following system of equations:

$$\begin{matrix}Score = \frac{{f}_{1} - {f}_{2}}{\sqrt{( \frac{1}{{N}_{1}} + \frac{1}{{N}_{2}} ) P ( 1 - P )}} \\ P = \frac{{N}_{1} {f}_{1} - {N}_{2} {f}_{2}}{{N}_{1} + {N}_{2}}\end{matrix}$$

[0226] wherein f₁ is the frequency of the polynucleotide fragment sequence in the first population,
[0227] wherein f₂ is the frequency of the same polynucleotide fragment sequence in the second population,
[0228] wherein N₁ is the size of the first population, and
[0229] wherein N₂ is the size of the second population.

### Embodiment 57

[0230] The method of Embodiment 56, wherein the first population has a protein expression level in the top 0-10 percent of protein expression levels of the total population and wherein the second population has a protein expression level in the bottom 10-90 percent of the protein expression levels of the total population.

### Embodiment 58

[0231] The method of Embodiment 56 or 57, wherein the first population has a protein expression level in the top 50.1 percent of protein expression levels of the total population and wherein the second population has a protein expression level in the bottom 49.9 percent of the protein expression levels of the total population.

### Embodiment 59

[0232] The method of Embodiment 56 or 57, wherein the first population has a protein expression level in the top 10 percent of protein expression levels of the total population and wherein the second population has a protein expression level in the bottom 90 percent of the protein expression levels of the total population.

### Embodiment 60

[0233] The method of any one of Embodiments 38-59, wherein the polynucleotide fragment sequence is 5 nucleic acid residues in length.

### Embodiment 60-1

[0234] The method of Embodiment 60, wherein the polynucleotide fragment sequence is selected from SEQ ID NO: 1-1024 with an enrichment score as shown in Table 1.

### Embodiment 61

[0235] The method of any one of Embodiments 38-59, wherein the polynucleotide fragment sequence is 6 nucleic acid residues in length.

### Embodiment 62

[0236] The method of any one of Embodiments 38-59, wherein the polynucleotide fragment sequence is 7 nucleic acid residues in length.

### Embodiment 63

[0237] The method of any one of Embodiments 38-59, wherein the polynucleotide fragment sequence is 8 nucleic acid residues in length.

### Embodiment 64

[0238] The method of any one of Embodiments 38-59, wherein the polynucleotide fragment sequence is 9 nucleic acid residues in length.

### Embodiment 65

[0239] The method of any one of Embodiments 38-59, wherein the polynucleotide fragment sequence is 10 nucleic acid residues in length.

### Embodiment 66

[0240] The method of any one of Embodiments 38-59, wherein the polynucleotide fragment sequence is 11 nucleic acid residues in length.

### Embodiment 67

[0241] The method of any one of Embodiments 38-59, wherein the polynucleotide fragment sequence is 12 nucleic acid residues in length.

### Embodiment 68

[0242] The method of any one of Embodiments 38-59, wherein the polynucleotide fragment sequence is 13-100 nucleic acid residues in length.

### Embodiment 69

[0243] An RNA polynucleotide comprising an engineered translation initiation element (TI), wherein the TI comprises an Internal Ribosome Entry Site (IRES)-like polynucleotide sequence generated by the method of any one of Embodiments 38-68.

### Embodiment 70

[0244] A polypeptide expressed by the RNA polynucleotide of Embodiment 69.

### Embodiment 71

[0245] A DNA vector encoding the RNA polynucleotide of Embodiment 69.

### Embodiment 72

[0246] A DNA vector suitable for synthesizing the RNA polynucleotide of Embodiment 69.

### Embodiment 73

[0247] A cell comprising the RNA polynucleotide of Embodiment 69, the polypeptide of Embodiment 70, or the DNA vector of Embodiment 71 or 72.

### Embodiment 74

[0248] A composition comprising the RNA polynucleotide of Embodiment 69, the polypeptide of Embodiment 70, the DNA vector of Embodiment 71 or 72, or the cell of Embodiment 73, and a pharmaceutically acceptable carrier.

### Embodiment 75

[0249] A method of making a population of cells comprising contacting the cells of the population with the RNA polynucleotide of Embodiment 69, the polypeptide of Embodiment 70, or the DNA vector of Embodiment 71 or 72.

### Embodiment 76

[0250] A method of modulating the expression of a protein in a subject in need thereof, comprising administering to the subject a therapeutically effective amount of the polynucleotide of any one of Embodiments 1-31 and 69, the polypeptide of Embodiment 32 or 70, the DNA vector of Embodiment 33, 34, 71, or 72, or the cell of Embodiment 35 or 73.

### Embodiment 77

[0251] A method of treating or preventing a disease or disorder in a subject in need thereof, comprising administering to the subject a therapeutically effective amount of the polynucleotide of any one of Embodiments 1-31 and 69, the polypeptide of Embodiment 32 or 69, the DNA vector of Embodiment 33, 34, 71, or 72, or the cell of Embodiment 35 or 73.

### Embodiment 78

[0252] Use of the polynucleotide of any one of Embodiments 1-31 and 69, the polypeptide of Embodiment 32 or 70, the DNA vector of Embodiment 33, 34, 71, or 72, or the cell of Embodiment 35 or 73 in the manufacture of a medicament for modulating the expression of a protein or treating or preventing a disease or disorder in a subject in need thereof.

### Embodiment 79

[0253] A polynucleotide according to any one of Embodiments 1-31 and 69, a polypeptide according to Embodiment 32 or 70, a DNA vector according to Embodiment 33, 34, 71, or 72, or a cell according to claim 35 or 73 for modulating the expression of a protein or treating or preventing a disease or disorder in a subject in need thereof.

### 7. BRIEF DESCRIPTION OF THE DRAWINGS

[0254] FIG. 1 shows a schematic diagram of an IRES-like sequence generation method of the disclosure. An exemplary polynucleotide query sequence is generated (e.g., 12-mer nucleotide sequence). Overlapping polynucleotide fragment sequences within the polynucleotide query sequence are generated (e.g., pentamers 1-8). An enrichment score for each polynucleotide fragment sequence is generated (e.g., z-scores of pentamers 1-8). A numerical score for the polynucleotide query sequence is generated by summing the enrichment scores of each polynucleotide fragment sequence (e.g., sum of z-score values). The polynucleotide query sequence is identified as an IRES-like sequence when the numerical score for the polynucleotide query sequence is above a determined threshold.

[0255] FIG. 2 shows a western blot analysis of protein expression from exemplary circular RNAs having IRES-like sequences with 12 nucleotides in length (12-mer). Z-score (numerical score) and percentile ranking out of all 12-mer nucleotide sequences tested are shown.

[0256] FIG. 3 shows a schematic flow chart of an IRES-like sequence optimization method of the disclosure.

[0257] FIG. 4 shows a schematic flow chart of an IRES-like sequence optimization method of the present disclosure.

[0258] FIG. 5 is a flow chart illustrating a process of obtaining a circular RNA of the present disclosure.

[0259] FIG. 6 is a bar graph showing the luminescent signal of luciferase protein expression from exemplary circular RNAs having IRES-like sequences of the present disclosure.

[0260] FIG. 7 are images showing In Vivo Imaging System (IVIS) Spectrum of protein expression after IV injection of exemplary circular RNAs having a combination of natural IRES and IRES-like sequences of the present disclosure.

[0261] FIG. 8 are diagrams illustrating self-circularization with group I or group II intron.

[0262] FIG. 9 are gel images showing RNA self-splicing based on two splicing group II introns along with the flanking exon sequences.

[0263] FIG. 10A are gel images showing RNA splicing (upper panel) and bar graph indicating percent of RNA circularization determined by electrophoresis (lower panel).

[0264] FIG. 10B are gel images showing the results of experiments verifying the successful formation of circular RNAs by different methods.

[0265] FIG. 11 are gel images showing the results of the circularization products of the three target sequences without scars under different magnesium ion concentrations.

[0266] FIG. 12A is a flow cytometry plot showing the protein expression from cells expressing exemplary circular RNAs having a translation initiation element.

[0267] FIG. 12B shows a western blot analysis of protein expression from exemplary circular RNAs having a translation initiation element with 6 nucleotides in length (i.e., IRES-like element, 6-mer). Z-score (numerical score) and percentile ranking out of all 6-mer nucleotide sequences tested are shown.

[0268] FIG. 12C-12E shows a series of western blot analyses of protein expression from exemplary circular RNAs having a translation initiation element with 12 nucleotides in length (i.e. IRES-like element, 12-mer). Z-score (numerical score) and percentile ranking out of all 12-mer nucleotide sequences tested are shown.

[0269] FIG. 13A shows the IRES-like sequence with the highest ranked numerical score at each polynucleotide query length. The number on the left represents the total length of each nucleotide. Nucleotide length (SEQ ID NO)—Length 6 (SEQ ID NO: 1025); Length 7 (SEQ ID NO: 1225); Length 8 (SEQ ID NO: 1425); Length 9 (SEQ ID NO: 1625); Length 10 (SEQ ID NO: 1826); Length 11 (SEQ ID NO: 2026); Length 12 (SEQ ID NO: 2226); Length 13 (SEQ ID NO: 2426); Length 14 (SEQ ID NO: 2626); Length 15 (SEQ ID NO: 2827); Length 16 (SEQ ID NO: 3028); Length 17 (SEQ ID NO: 3229); Length 18 (SEQ ID NO: 3429); Length 19 (SEQ ID NO: 3629); Length 20 (SEQ ID NO: 3829); Length 21 (SEQ ID NO: 4033).

[0270] FIG. 13B shows a graph of the highest ranked numerical score for each polynucleotide query length. The y-axis shows the highest ranked numerical score (i.e. highest Z-score). The x-axis shows the length of the polynucleotide query sequence tested. The equation of the line is Numerical Score=23.74869×length of polynucleotide query sequence−84.85243.

[0271] FIG. 14A shows a graph of the predicted numerical scores for a polynucleotide query sequence length of 12, 18, 50 or 100 nucleotides. The y-axis shows the numerical score. The x-axis shows the percentile rank.

[0272] FIG. 14B shows a graph of the predicted numerical scores for a polynucleotide query sequence length of 12 nucleotides. This graph represents a zoomed image of the top percentile ranks (99.99250% to 100%). The y-axis shows the numerical score. The x-axis shows the percentile rank. For 12 mer sequences, the 99.99533% percentile corresponds to a numerical score of 165.55; the 99.99600% percentile corresponds to a numerical score of 167.43; the 99.99700% percentile corresponds to a numerical score of 171.34; the 99.99800% percentile corresponds to a numerical score of 174.88; the 99.99900% percentile corresponds to score 181.30; the 100% percentile corresponds to a numerical score 198.32.

[0273] FIG. 14C shows a graph of the predicted numerical scores for a polynucleotide query sequence length of 18 nucleotides. This graph represents a zoomed image of the top percentile ranks (99.99250% to 100%). The y-axis shows the numerical score. The x-axis shows the percentile rank. For 18 mer sequences, the 99.9950% percentile corresponds to score 210.98, the 99.9960% percentile corresponds to score 216.97, the 99.9970% percentile corresponds to score 222.21, the 99.9980% percentile corresponds to score 229.26, the 99.9990% percentile corresponds to score 240.88, the 100% percentile corresponds to score 341.65.

[0274] FIG. 14D shows a graph of the predicted numerical scores for a polynucleotide query sequence length of 50 nucleotides. This graph represents a zoomed image of the top percentile ranks (99.99250% to 100%). The y-axis shows the numerical score. The x-axis shows the percentile rank. For 50 mer sequences, the 99.9950% percentile corresponds to score 309.20, the 99.9960% percentile corresponds to score 315.56, the 99.9970% percentile corresponds to score 323.64, the 99.9980% percentile corresponds to score 335.22, the 99.9990% percentile corresponds to score 354.05, the 100% percentile corresponds to score 1101.43.

[0275] FIG. 14E shows a graph of the predicted numerical scores for a polynucleotide query sequence length of 100 nucleotides. This graph represents a zoomed image of the top percentile ranks (99.99250% to 100%). The y-axis shows the numerical score. The x-axis shows the percentile rank. For 100 mer sequences, the 99.9950% percentile corresponds to score 384.85, the 99.9960% percentile corresponds to score 393.02, the 99.9970% percentile corresponds to score 403.11, the 99.9980% percentile corresponds to score 416.68, the 99.9990% percentile corresponds to score 439.34, the 100% percentile corresponds to score 2289.57.

[0276] FIG. 15 shows a graph of the luminescent signal of luciferase protein expression from exemplary circular RNAs having IRES-like sequences of the present disclosure. The y-axis shows the luminescence value. The x-axis shows the six exemplary circular RNAs (V1, V3, V4, V5, V6 and V7), wherein V1, V3, V4, V5, V6 and V7 total length (linker sequence+IRES-like sequence), SEQ ID corresponding Z-score and SEQ ID corresponding percentile show in the table.

[0277] FIG. 16 shows a graph of group II intron's general structure. As shown, a typical group II intron can have six stem-loop structures, referred to as Domains 1-6, or D1-D6. D4 contains an open reading frame. The 6 domains are sequentially arranged and comprise multiple exon binding sequences (EBSs), such as EBS1, EBS2, and EBS3. These EBS sequences interact, such as complementarily pair, with the intron binding sequences (IBSs) in exon regions (such as IBS1, IBS2, and IBS3), to trigger self-splicing. Note that a single nucleotide, the δ nucleotide, which is located directly upstream of EBS1 in domain 1 can also pair with IBS3, and the interaction between δ and IBS3 is referred to δ-IBS3 pairing.

### 8. DETAILED DESCRIPTION

[0278] The present disclosure overcomes problems associated with current technologies by providing a novel methodology for identifying and generating synthetic Internal Ribosome Entry Site (IRES)-like sequences. The present disclosure is based, at least in part, on the development of algorithmic methods and high-throughput reporter assays that can systematically screen and quantify the IRES activity of RNA sequences that can facilitate circular RNA translation. The inventors have systematically screened pools of random polynucleotide sequences that drive protein expression and have distinguished nucleic acid sequence motifs that enhance protein expression (i.e., IRES-like sequences) from nucleic acid sequence motifs that decrease protein expression (i.e., non-IRES sequences), or nucleic acid sequence motifs that more potently enhance protein expression (i.e., IRES-like sequences) from other nucleic acid sequence motifs, using a systematic ranking methods. This is useful for identification of novel sequences with IRES activity that may function more efficiently than natural IRES sequences. This is also useful for the identification of IRES elements that are universal and species independent.

[0279] Discovery of these nucleic acid sequence motifs allows for the generation of synthetic IRES-like sequences for use in enhancing protein expression in eukaryotic cells. Increasing protein expression is desirable to improve gene expression and/or protein expression and manufacture in therapeutic applications including, but not limited to protein replacement therapy and vaccinations. Further, the use of a combination of IRES-like sequences and non-IRES sequences provides the opportunity for fine-tuned control and modulation of protein expression. The use of IRES-like sequences together with non-IRES sequences is also advantageous for the precise control of the ratio of peptide expression in the manufacture and production of multimeric proteins and/or multicistronic cassettes for therapeutic applications, such as antibody production.

[0280] Accordingly, the present disclosure also provides IRES-like sequences and polynucleotides comprising the IRES-like sequences and an expression sequence encoding a therapeutic product of interest, which may be suitable for use as a medicament or a vaccine, such as for application in gene therapy and/or genetic vaccination. In some embodiments, the present disclosure provides polynucleotides comprising the IRES-like sequences and an expression sequence encoding a therapeutic product of interest, for use in improving protein manufacture and production. In some embodiments, the polynucleotide is an RNA polynucleotide. In some embodiments, the RNA polynucleotide is a circular RNA polynucleotide. Together, the present disclosure provides improved polynucleotides comprising IRES-like sequences, which overcome the disadvantages of in the prior art by providing a cost-effective, systematic and straight forward approach for modulating protein expression.

[0281] Provided herein are non-naturally occurring RNAs having group II intron self-splicing activity which, upon self-splicing, can form circular RNAs. Circular RNAs (circRNAs) are single-stranded RNAs that are joined head to tail. As known in the art, circRNAs can be produced in vitro using chemical means or via enzymatic activities from precursor RNA, which refers to the linear RNA molecule from which a circRNA is directly generated, regardless of the methods of circularization. For example, the 5′ end and 3′ end of a linear nucleic acid can be chemically linked by the catalysis of bromine cyanide and a morpholinyl derivative, or ligated in a head-to-tail manner by the activity of a nucleic acid ligase. CircRNAs can also be produced by splicing. When a linear precursor undergoes splicing, a portion of the molecule is excised, resulting in a circRNA that has fewer total nucleotides than the precursor RNA.

[0282] The circRNAs can also be produced by ribozyme-catalyzed RNA splicing. As used herein and understood in the art, the term “ribozyme” refers to an RNA molecule with an enzymatic activity. Some ribozymes can catalyze self-splicing independent of the spliceosome, which are referred to as “ribozymes with self-splicing activity,” “self-splicing ribozymes,” or “self-splicing introns.” Naturally occurring self-splicing ribozymes can be divided into group I and group II introns. Although the splicing products of the two categories of ribozymes are similar, the structures and splicing mechanisms of the ribozymes themselves are quite different. The group I intron has a 9-helix structure, which requires an external hydroxyl group in guanosine monophosphate (pG-OH) to trigger the reaction during catalytic splicing, and are highly dependent on the sequences of exons located at both ends of the group I intron. The group II intron relies on its own hydroxyl groups within the nucleotide sequence to trigger splicing. (See FIG. 8). This splicing mechanism is closer to the splicing reaction mediated by a spliceosome and better simulate splicing in higher organisms. The term “group I intron self-splicing activity” or “group I intron activity” refers to the self-splicing activity derived from a group I intron; and the term “group II intron self-splicing activity” or “group II intron activity” refers to the self-splicing activity derived from a group II intron. Method for preparing circRNAs based on group II intron self-splicing activities have at least the following advantages: reduction of the use of biological and chemical reagents (such as ligase and associated reagents), ease of operation, and simple design.

[0283] RNAs that are engineered ribozymes with self-splicing activity which, upon self-splicing, forms circRNAs are also referred to herein as “cRNAzymes.” In some embodiments, the cRNAzymes can have in vitro self-splicing activity. Disclosed herein are novel non-naturally occurring RNAs that have group II intron self-splicing activity and that, upon self-splicing, forms circRNAs, or “group II cRNAzymes.” Further provided herein are also vectors comprising polynucleotides encoding these group II cRNAzymes, methods of preparing the group II cRNAzymes disclosed herein by transcribing these vectors, and uses of these group II cRNAzymes in making circRNAs.

[0284] Before the present disclosure is further described, it is to be understood that the disclosure is not limited to the particular embodiments set forth herein, and it is also to be understood that the terminology used herein is for the purpose of describing particular embodiments, and is not intended to be limiting.

### 8.1. Definitions

[0285] As used herein, “essentially free,” in terms of a specified component, is used herein to mean that none of the specified component has been purposefully formulated into a composition and/or is present only as a contaminant or in trace amounts. The total amount of the specified component resulting from any unintended contamination of a composition is therefore well below 0.1%, preferably below 0.05%, and more preferably below 0.01%. Most preferred is a composition in which no amount of the specified component can be detected with standard analytical methods.

[0286] As used herein in the specification, “a” or “an” may mean one or more. As used herein in the claim(s), when used in conjunction with the word “comprising,” the words “a” or “an” may mean one or more than one.

[0287] As used herein, the term “or” in the claims is used to mean “and/or” unless explicitly indicated to refer to alternatives only or the alternatives are mutually exclusive, although the disclosure supports a definition that refers to only alternatives and “and/or.” As used herein “another” or “additional” may mean at least a second or more.

[0288] As used herein, the term “about” is used to indicate that a value includes the inherent variation of the value, for example, due to error for the device, the method being employed to determine the value, or the variation that exists among the study subjects. In some embodiments, “about” means that the variation is ±10%, ±9%, ±8%, ±7%, ±6%, ±5%, ±4%, ±3%, ±2%, ±1%, ±0.5%, ±0.2%, or ±0.1% of the value to which “about” refers. In some embodiments, “about” means that the variation is ±10%, ±9%, ±8%, ±7%, ±6%, ±5%, ±4%, ±3%, or ±2% of the value to which “about” refers. In some embodiments, “about” means that the variation is ±10% of the value to which “about” refers. In some embodiments, “about” means that the variation is ±5%, ±4%, ±3%, ±2, or ±1% of the value to which “about” refers. In some embodiments, “about” means that the variation is ±1%, ±0.5%, ±0.2%, or ±0.1% of the value to which “about” refers.

[0289] The terms “average” and “mean” are used interchangeably herein, unless explicitly indicated to the contrary.

[0290] As used herein, the term “portion” when used in reference to a polypeptide or a peptide refers to a fragment of the polypeptide or peptide. In some embodiments, a “portion” of a polypeptide or peptide retains at least one function and/or activity of the full-length polypeptide or peptide from which it was derived. For example, in some embodiments, if a full-length polypeptide binds a given ligand, a portion of that full-length polypeptide also binds to the same ligand.

[0291] The terms “protein” and “polypeptide” are used interchangeably herein, unless explicitly indicated to the contrary.

[0292] The term “exogenous,” when used in relation to a protein, gene, nucleic acid, or polynucleotide in a cell or organism refers to a protein, gene, nucleic acid, or polynucleotide that has been introduced into the cell or organism by artificial or natural means; or in relation to a cell, the term refers to a cell that was isolated and subsequently introduced into a cell population or to an organism by artificial or natural means. An exogenous nucleic acid may be from a different organism or cell, or it may be one or more additional copies of a nucleic acid that occurs naturally within the organism or cell. An exogenous cell may be from a different organism, or it may be from the same organism. By way of a non-limiting example, an exogenous nucleic acid is one that is in a chromosomal location different from where it would be in natural cells, or is otherwise flanked by a different nucleic acid sequence than that found in nature. The term “exogenous” is used interchangeably with the term “heterologous”.

[0293] By “expression construct” or “expression cassette” is used to mean a nucleic acid molecule that is capable of directing transcription. An expression construct includes, at a minimum, one or more transcriptional control elements (such as promoters, enhancers or a structure functionally equivalent thereof) that direct gene expression in one or more desired cell types, tissues or organs. Additional elements, such as a transcription termination signal, may also be included.

[0294] A “vector” or “construct” (sometimes referred to as a gene delivery system or gene transfer “vehicle”) refers to a macromolecule or complex of molecules comprising a polynucleotide, or the protein expressed by said polynucleotide, to be delivered to a host cell, either in vitro or in vivo.

[0295] A “plasmid,” a common type of a vector, is an extra-chromosomal DNA molecule separate from the chromosomal DNA that is capable of replicating independently of the chromosomal DNA. In certain cases, it is circular and double-stranded.

[0296] The term “cRNAzyme” is used herein to refer a linear ribonucleic acid (RNA) which is capable of producing a circular RNA via a self-catalyzed back-splicing reaction.

[0297] The term “cRNAzyme construct” is a linear RNA construct which has cRNAzyme activity.

[0298] The term “EBS” is used herein to refer to an exon binding sequence, which interacts with (e.g., forming a complementary pair) the intron binding sequences (IBSs) in exon regions, triggering splicing by virtue of their own hydroxyl groups within the EBS.

[0299] The term “IBS” is used herein to refer to an intron binding sequence, which interacts with (e.g., forming a complementary pair) exon binding sequences (EBSs) to locate the splicing site.

[0300] The term “EBS1” is used herein to refer to exon binding sequence 1. In some embodiments, the EBS1 comprises a nucleic acid sequence selected from the group consisting of: (a) UAGGGC; (b) UUAUGG; (c) UCAACG; and (d) UGUGGC.

[0301] The term “EBS2” is used herein to refer to exon binding sequence 2.

[0302] The term “EBS3” is used herein to refer to exon binding sequence 3.

[0303] The term “EBS1′” is used herein to refer to a modified EBS1 sequence which interacts with IBS1′. The interaction between EBS1′ and IBS1′ is similar as the interaction between EBS1 and IBS1. In some embodiments, the EBS1′ comprises a nucleic acid sequence selected from the group consisting of: (a) UAGGGC; (b) UUAUGG; (c) UCAACG; and (d) UGUGGC.

[0304] The term “EBS3′” is used herein to refer to a modified EBS3 sequence which interacts with IBS3′. The interaction between EBS3′ and IBS3′ is similar as the interaction between EBS3 and IBS3.

[0305] The term “IBS1” is used herein to refer to an intron binding sequence 1, which interacts with exon binding sequence 1 (EBS 1) to locate splicing site. In some embodiments, the IBS1 comprises a nucleic acid sequence selected from the group consisting of: (a) GCCCUG; (b) CCAUGG; (c) CGUUGA; and (d) GCCAUA.

[0306] The term “IBS1′” is used herein to refer to a region on a target sequence which has similar function of IBS1.

[0307] The term “IBS2” is used herein to refer to an intron binding sequence 2, which interacts with exon binding sequence 2 (EBS2) to locate splicing site.

[0308] The term “IBS3” is used herein to refer to an intron binding sequence 3, which interacts with exon binding sequence 3 (EBS3) to locate splicing site. In some embodiments, the IBS3 and its downstream sequence comprises a nucleic acid sequence selected from the group consisting of: (a) AGCAAA; (b) AGCAGU; (c) AGAGAA; and (d) AGCAAA.

[0309] The term “IBS3′” is used herein to refer to a region on a target sequence which has similar function of IBS3.

[0310] The term “δ” (delta) is used herein to refer to a region in domain 1 of a group II intron which is the single nucleotide directly upstream of EBS1. δ pairs with IBS3 and the interaction between δ and IBS3 is called δ-IBS3 pairing. In some embodiments, the 6 sequence and its upstream comprises a nucleic acid sequence selected from the group consisting of: (a) UGUGCU; (b) AAUGCU; (c) UGCUCU; and (d) UGUGCU.

[0311] The term “δ″” (delta″) is used herein to refer to a region in domain I of a group II intron which is the single nucleotide directly upstream of EBS1′. δ″ pairs with IBS3′ and the interaction between δ″ and IBS3′ is called δ″-IBS3′ pairing.

[0312] As used herein, the term “group II intron” and “Group II intron” are used herein interchangeably to refer to RNA molecules which are encoded by the group II introns, share a similar secondary and tertiary structure. Group II intron RNA molecules typically have six domains. Group II intron mainly comprises 6 stem-loop structures, called domains 1 to 6 (D1 to D6), and the 6 domains are arranged in sequence, comprising multiple exon binding sequences (EBSs), such as EBS1, EBS2, and EBS3.

[0313] A group II intron may have a modification of one or more nucleotides relative to its wild-type form, and the modification is selected from one or more of a deletion, a substitution, and an addition. In some embodiments, the modification comprises a modification of one or more EBS sequences of the group II intron, wherein the EBS sequences are complementarily paired with one or more regions of a corresponding length in a target sequence on at least 60% of the nucleotide positions respectively. In some embodiments, the modification is a modification of the two EBS sequences of the group II intron, such as EBS1 and EBS3, wherein the EBS sequences are complementarily paired with two regions of a corresponding length in a target sequence on at least 60% of the nucleotide positions respectively; preferably, the two regions are located at both ends of the target sequence, respectively. In some embodiments, the modification is a modification of the two EBS sequences of the group II intron, such as EBS1′ and EBS3′, wherein the EBS sequences are complementarily paired with two regions of a corresponding length in a target sequence on at least 60% of the nucleotide positions respectively; preferably, the two regions are located at both ends of the target sequence, respectively. In some embodiments, the modification is a modification of EBS1 and/or δ sequence of the group II intron, or a modification of EBS1′ and/or δ sequence, wherein the EBS1 and/or δ sequence is complementarily paired with a region of a corresponding length in a target sequence on at least 60% of the nucleotide, optionally the modification is a modification of EBS1 and/or δ sequence and its upstream sequence, wherein the EBS1 and/or δ sequence and its upstream is complementarily paired with a region of a corresponding length in a target sequence on at least 60% of the nucleotide. In some embodiments, the modification is a modification of EBS1 and/or δ sequence of the group II intron, or a modification of EBS1′ and/or δ″ sequence, wherein the EBS1 and/or δ sequence is complementarily paired with a region of a corresponding length in a target sequence on at least 60%, 61%, 62%, 63%, 64%, 65%, 66%, 67%, 68%, 69%, 70%, 71%, 72%, 73%, 74%, 75%, 76%, 77%, 78%, 79%, 80%, 81%, 82%, 83%, 84%, 85%, 86%, 87%, 88%, 89%, 90%, 91%, 92%, 93%, 94%, 95%, 96%, 97%, 98%, 99%, or 100% of the nucleotide, optionally the modification is a modification of EBS1 and/or δ sequence and its upstream sequence, wherein the EBS1 and/or δ sequence and its upstream sequence is complementarily paired with a region of a corresponding length in a target sequence on at least 60% of the nucleotide. In some embodiments, the region of a corresponding length in a target sequence is IBS3, IBS3′, IBS3 with downstream sequence, or IBS3′ with downstream sequence. In some embodiments, the modification comprises a deletion of part or all of domain 4, such as a deletion of an intron-encoded protein (IEP) sequence in domain 4, preferably a deletion of all of domain 4. In some embodiments, the modification comprises a deletion of an open reading frame (ORF).

[0314] The term “domain 1” or “D1” is used herein to refer to a stem-loop structure of domain 1 of a Group II intron. The term “domain 2” or “D2” is used herein to refer to a stem-loop structure of domain 2 of a Group II intron. The term “domain 3” or “D3” is used herein to refer to a stem-loop structure of domain 3 of a Group II intron. The term “domain 4” or “D4” is used herein to refer to a stem-loop structure of domain 4 of a Group II intron. The term “domain 5” or “D5” is used herein to refer to a stem-loop structure of domain 5 of a Group II intron. The term “domain 6” or “D6” is used herein to refer to a stem-loop structure of domain 6 of a Group II intron. Stem-loop structure is a type of an RNA secondary structure, which can be determined by any suitable polynucleotide folding algorithm. Some programs are based on the calculation of the minimum Gibbs free energy. An exemplary algorithm is mFold (Zuker and Stiegler, Nucleic Acids Res. 9, 133-148 (1981)). Other exemplary folding algorithms are known in the art, for example, as described in A R Gruber et al., Cell 106, 23-24 (2008), P A Carr and G M Church, Nature Biotechnology 27, 1151-62 (2009)), PCT Application No. WO 2014093709, which is incorporated herein by reference.

[0315] The term “5′ intron fragment” and “3′ intron fragment” are used herein to refer the intron fragments obtained by segmenting a group II intron at a loop region of a stem-loop structure of domain 1, 2, 3, 4, 5, or 6.

[0316] The terms “nucleic acid sequence”, “polynucleotide”, and “oligonucleotide” are used interchangeably herein, unless specified otherwise or the context indicates to the contrary, and refer to a polymer or oligomer of pyrimidine and/or purine bases, such as cytosine, thymine and uracil, adenine, and guanine, respectively (see Albert L. Lehninger, Principles of Biochemistry, at 793-800 (Worth Pub. 1982)). The terms encompass any deoxyribonucleotide, ribonucleotide, or peptide nucleic acid component, and any chemical variants thereof, such as methylated, hydroxymethylated, or glycosylated forms of these bases. The polymers or oligomers may be heterogenous or homogenous in composition, may be isolated from naturally occurring sources, or may be artificially or synthetically produced. In addition, the nucleic acids may be DNA or RNA, or a mixture thereof, and may exist permanently or transitionally in single-stranded or double-stranded form, including homoduplex, heteroduplex, and hybrid states. A nucleic acid or nucleic acid sequence may comprise other kinds of nucleic acid structures such as, for instance, a DNA/RNA helix, peptide nucleic acid (PNA), morpholino nucleic acid (see, e.g., Braasch and Corey, Biochemistry, 4/(14): 4503-4510 (2002) and U.S. Pat. No. 5,034,506), locked nucleic acid (LNA; see Wahlestedt et al., Proc. Natl. Acad. Sci. U.S.A., 97: 5633-5638 (2000)), cyclohexenyl nucleic acids (see Wang, Am. Chem. Soc., 122: 8595-8602 (2000)), and/or a ribozyme. The terms “nucleic acid”, “nucleic acid sequence”, “polynucleotide”, and “oligonucleotide” may also encompass a chain comprising non-natural nucleotides, modified nucleotides, and/or non-nucleotide building blocks that can exhibit the same function as natural nucleotides (e.g., “nucleotide analogs”). The term “DNA sequence” is used herein to refer to a nucleic acid comprising a series of DNA bases.

[0317] As is understood in the art, a nucleic acid strand is inherently directional, as the carbon atoms in the sugar ring are numbered from 1′ to 5′ and the “5′-end” has a free hydroxyl (or phosphate) on a 5′ carbon and the “3′ prime end” has a free hydroxyl (or phosphate) on a 3′ carbon. As used herein and understood in the art, a nucleic acid having certain sequence elements “from 5′ to 3′” means that these sequence elements are arranged linearly from the 5′ end to the 3′ end of the nucleic acid.

[0318] As used herein, “complementary” in reference to an oligonucleotide means that at least 70% of the nucleobases of the oligonucleotide or one or more regions thereof and the nucleobases of another nucleic acid or one or more regions thereof are capable of hydrogen bonding with one another when the nucleobase sequence of the oligonucleotide and the other nucleic acid are aligned in opposing directions. Complementary nucleobases means nucleobases that are capable of forming hydrogen bonds with one another. Complementary nucleobase pairs include, but unless otherwise specific are not limited to, adenine (A) and thymine (T); adenine (A) and uracil (U); cytosine (C) and guanine (G); and 5-methyl cytosine (^{m}C) and guanine (G). Complementary oligonucleotides and/or nucleic acids need not have nucleobase complementarity at each nucleoside. Rather, some mismatches are tolerated. As used herein, “fully complementary” or “100% complementary” in reference to oligonucleotides means that oligonucleotides are complementary to another oligonucleotide or nucleic acid at each nucleoside of the oligonucleotide.

[0319] As used herein, the term “nucleobase” means an unmodified nucleobase or a modified nucleobase. As used herein “an “unmodified nucleobase” is adenine (A), thymine (T), cytosine (C), uracil (U), and guanine (G). As used herein, a “modified nucleobase” is a group of atoms other than unmodified A, T, C, U, or G capable of pairing with at least one unmodified nucleobase. A “5-methyleytosine” is a modified nucleobase. A universal base is a modified nucleobase that can pair with any one of the five unmodified nucleobases. As used herein, “nucleobase sequence” means the order of contiguous nucleobases in a nucleic acid or oligonucleotide independent of any sugar or internucleoside linkage modification.

[0320] As used herein, the term “nucleoside” means a compound comprising a nucleobase and a sugar moiety. The nucleobase and sugar moiety are each, independently, unmodified or modified. As used herein, “modified nucleoside” means a nucleoside comprising a modified nucleobase and/or a modified sugar moiety. Modified nucleosides include abasic nucleosides, which lack a nucleobase. “Linked nucleosides” are nucleosides that are connected in a continuous sequence (i.e., no additional nucleosides are present between those that are linked).

[0321] The terms “polypeptide” and “protein” are used interchangeably herein, unless specified otherwise or the context indicates to the contrary, and refer to a polymeric form of amino acids comprising at least two or more contiguous amino acids chemically or biochemically modified or derivatized amino acids. The term “peptide” as used herein refers to a class of short polypeptides. The term peptide may refer to a polymer of amino acids (natural or non-naturally occurring) having a length of up to about 100 amino acids. For example, peptides may be about 1 to about 10, about 10 to about 25, about 25 to about 50, about 50 to about 75, about 75 to about 100 amino acid residues in length. In some embodiments, the peptides may be about 100, about 200, about 300, about 400, about 500, about 600, about 700, about 800, about 900, about 1000, about 1250, about 1500, about 1750, about 2000, about 2250, about 2500, about 2750, about 3000, about 3250, about 3500, about 3750, about 4000, about 4250, about 4500, about 4750, are about 5000 amino acid residues in length.

[0322] Nomenclature for nucleotides, nucleic acids, nucleosides, and amino acids used herein is consistent with International Union of Pure and Applied Chemistry (IUPAC) standards (see, e.g., bioinformatics.org/smsylupac.html).

[0323] When referring to a nucleic acid sequence or protein sequence, the term “identity” is used to denote similarity between two sequences. Sequence similarity or identity may be determined using standard techniques known in the art, including, but not limited to, the local sequence identity algorithm of Smith & Waterman, Adv. Appl. Math. 2, 482 (1981), by the sequence identity alignment algorithm of Needleman & Wunsch, J Mol. Biol. 48,443 (1970), by the search for similarity method of Pearson & Lipman, Proc. Natl. Acad. Sci. USA 85, 2444 (1988), by computerized implementations of these algorithms (GAP, BESTFIT, FASTA, and TFASTA in the Wisconsin Genetics Software Package, Genetics Computer Group, 575 Science Drive, Madison, WI), the Best Fit sequence program described by Devereux et al., Nucl. Acid Res. 12, 387-395 (1984), or by inspection. Another algorithm is the BLAST algorithm, described in Altschul et al., J Mol. Biol. 215, 403-410, (1990) and Karlin et al., Proc. Natl. Acad. Sci. USA 90, 5873-5787 (1993). A particularly useful BLAST program is the WU-BLAST-2 program which was obtained from Altschul et al., Methods in Enzymology, 266, 460-480 (1996); blast.wustl/edu/blast/README.html. WU-BLAST-2 uses several search parameters, which are optionally set to the default values. The parameters are dynamic values and are established by the program itself depending upon the composition of the particular sequence and composition of the particular database against which the sequence of interest is being searched; however, the values may be adjusted to increase sensitivity. Further, an additional useful algorithm is gapped BLAST as reported by Altschul et al, (1997) Nucleic Acids Res. 25, 3389-3402. Unless otherwise indicated, percent identity is determined herein using the algorithm available at the internet address: blast.ncbi.nlm.nih.gov/Blast.cgi.

[0324] The terms “internal ribosome entry site,” “internal ribosome entry site sequence,” “IRES” and “IRES sequence region” are used interchangeably herein and refer to cis elements of viral or human cellular RNAs (e.g., messenger RNA (mRNA) and/or circRNAs) that bypass the steps of canonical eukaryotic cap-dependent translation initiation. The canonical cap-dependent mechanism used by the vast majority of eukaryotic mRNAs requires an m⁷G cap at the 5′ end of the mRNA, initiator Met-tRNAmet, more than a dozen initiation factor proteins, directional scanning, and GTP hydrolysis to place a translationally competent ribosome at the start codon. IRESs typically are comprised of a long and highly structured 5-UTR which mediates the translation initiation complex binding and catalyzes the formation of a functional ribosome.

[0325] The term “IRES-like sequence” or “Internal Ribosome Entry Site-like sequence” refer to synthetic nucleotide sequences that display a function of a natural IRES. In some embodiments, the IRES-like sequence can recruit ribosomal components to mediate cap-independent translation.

[0326] The terms “coding sequence,” “coding sequence region,” “coding region,” and “CDS” when referring to nucleic acid sequences may be used interchangeably herein to refer to the portion of a DNA or RNA sequence, for example, that is or may be translated to protein. The terms “reading frame,” “open reading frame,” and “ORF,” may be used interchangeably herein to refer to a nucleotide sequence that begins with an initiation codon (e.g., ATG) and, in some embodiments, ends with a termination codon (e.g., TAA, TAG, or TGA). Open reading frames may contain introns and exons, and as such, all CDSs are ORFs, but not all ORF are CDSs.

[0327] The term “X-mer” refers to in a polynucleotide sequence (e.g., an IRES-like sequence) with an “X” number of nucleic acid residues/nucleotides (wherein “X” is an integer). For example, “10-mer” indicates a polynucleotide sequence of the present disclosure having 10 nucleic acid residues/nucleotides.

[0328] The terms “complementary” and “complementarity” refers to the relationship between two nucleic acid sequences or nucleic acid monomers having the capacity to form hydrogen bond(s) with one another by either traditional Watson-Crick base-paring or other non-traditional types of pairing. The degree of complementarity between two nucleic acid sequences can be indicated by the percentage of nucleotides in a nucleic acid sequence which can form hydrogen bonds (e.g., Watson-Crick base pairing) with a second nucleic acid sequence (e.g., about 50%, about 60%, about 70%, about 80%, about 90%, and 100% complementary). Two nucleic acid sequences are “perfectly complementary” if all the contiguous nucleotides of a nucleic acid sequence will hydrogen bond with the same number of contiguous nucleotides in a second nucleic acid sequence. Two nucleic acid sequences are “substantially complementary” if the degree of complementarity between the two nucleic acid sequences is at least 60% (e.g., at least 65%, at least 70%, at least 75%, at least 80%, at least 85%, at least 90%, at least 95%, at least 97%, at least 98%, at least 99%, or 100%) over a region of at least 8 nucleotides (e.g., at least 9, at least 10, at least 11, at least 12, at least 13, at least 14, at least 15, at least 16, at least 17, at least 18, at least 19, at least 20, at least 21, at least 22, at least 23, at least 24, at least 25, at least 30, at least 35, at least 40, at least 45, at least 50, or more nucleotides), or if the two nucleic acid sequences hybridize under at least moderate, or, in some embodiments high, stringency conditions. Exemplary moderate stringency conditions include overnight incubation at 37° C. in a solution comprising 20% formamide, 5% SSC (150 mM NaCl, 15 mM trisodium citrate), 50 mM sodium phosphate (pH 7.6), 5×Denhardt's solution, 10% dextran sulfate, and 20 mg/ml denatured sheared salmon sperm DNA, followed by washing the filters in 1*SSC at about 37-50° C., or substantially similar conditions, e.g., the moderately stringent conditions described in Sambrook, J., Molecular Cloning: A Laboratory Manual, Cold Spring Harbor Laboratory Press; 4th edition (Jun. 15, 2012). High stringency conditions are conditions that use, for example (1) low ionic strength and high temperature for washing, such as 0.015 M sodium chloride/0.0015 M sodium citrate/0.1% sodium dodecyl sulfate (SDS) at 50° C., (2) employ a denaturing agent during hybridization, such as formamide, for example, 50% (v/v) formamide with 0.10% bovine serum albumin (BSA)/0.1% Ficoll/0.1% polyvinylpyrrolidone (PVP)/50 mM sodium phosphate buffer at pH 6.5 with 750 mM sodium chloride and 75 mM sodium citrate at 42° C., or (3) employ 50% formamide, 5×SSC (0.75 M NaCl, 0.075 M sodium citrate), 50 mM sodium phosphate (pH 6.8), 0.1% sodium pyrophosphate, 5×Denhardt's solution, sonicated salmon sperm DNA (50 pg/ml), 0.1% SDS, and 10% dextran sulfate at 42° C., with washes at (i) 42° C. in 0.2*SSC, (ii) 55° C. in 50% formamide, and (iii) 55° C. in 0.1*SSC (optionally in combination with EDTA). Additional details and an explanation of stringency of hybridization reactions are provided in, e.g., Sambrook, supra, and Ausubel et al., eds., Short Protocols in Molecular Biology, 5th ed., John Wiley & Sons, Inc., Hoboken, N.J. (2002).

[0329] The term “animal” refers to human and non-human animals, including non-human primates (e.g., bonobos, chimpanzees, gorillas, monkeys), and other animals, such as birds, pigs, horses, dogs, cats, rabbits, mice, rats, cows, sheep, goats, and deer.

[0330] The term “hybridization” or “hybridized” when referring to nucleic acid sequences is the association formed between and/or among sequences having complementarity.

[0331] The term “control elements” refers collectively to promoter regions, polyadenylation signals, transcription termination sequences, upstream regulatory domains, origins of replication, internal ribosome entry sites (IRES), enhancers, splice junctions, and the like, which collectively provide for the replication, transcription, post-transcriptional processing, and translation of a coding sequence in a recipient cell. Not all of these control elements need to be present so long as the selected coding sequence is capable of being replicated, transcribed, and translated in an appropriate host cell.

[0332] The term “promoter” is used herein to refer to a nucleotide region comprising a DNA regulatory sequence, wherein the regulatory sequence is derived from a gene that is capable of binding to an RNA polymerase and allowing for the initiation of transcription of a downstream (3′ direction) coding sequence. It may contain genetic elements at which regulatory proteins and molecules may bind, such as RNA polymerase and other transcription factors, to initiate the specific transcription of a nucleic acid sequence. The phrases “operatively positioned,” “operatively linked,” “under control,” and “under transcriptional control” mean that a promoter is in a correct functional location and/or orientation in relation to a nucleic acid sequence to control transcriptional initiation and/or expression of that sequence.

[0333] By “enhancer” is meant a nucleic acid sequence that, when positioned proximate to a promoter, confers increased transcription activity relative to the transcription activity resulting from the promoter in the absence of the enhancer domain.

[0334] By “operably linked” with reference to nucleic acid molecules is meant that two or more nucleic acid molecules (e.g., a nucleic acid molecule to be transcribed, a promoter, and a functional effector element) are connected in such a way as to permit transcription of the nucleic acid molecule.

[0335] The term “homology” refers to the percent of identity between the nucleic acid residues of two polynucleotides or the amino acid residues of two polypeptides. The correspondence between one sequence and another can be determined by techniques known in the art. For example, homology can be determined by a direct comparison of the sequence information between two polypeptides by aligning the sequence information and using readily available computer programs. Two polynucleotide (e.g., DNA) or two polypeptide sequences are “substantially homologous” to each other when at least about 80%, preferably at least about 90%, and most preferably at least about 95% of the nucleotides, or amino acids, respectively match over a defined length of the molecules, as determined using the methods above.

[0336] “Treating” or “treatment of a disease or condition” refers to executing a protocol or treatment plan, which may include administering one or more drugs or active agents to a patient, in an effort to alleviate signs or symptoms of the disease or the recurrence of the disease. Desirable effects of treatment include decreasing the rate of disease progression, ameliorating or palliating the disease state, and remission, increased survival, improved quality of life or improved prognosis. Alleviation or prevention can occur prior to signs or symptoms of the disease or condition appearing, as well as after their appearance. In addition, “treating” or “treatment” does not require complete alleviation of signs or symptoms, and does not require a cure.

[0337] The term “therapeutic benefit” or “therapeutically effective” as used throughout this disclosure refers to anything that promotes or enhances the well-being of the subject with respect to the medical treatment of this condition. This includes, but is not limited to, a reduction in the frequency, severity, or rate of progression of the signs or symptoms of a disease. For example, treatment of cancer may involve, for example, a reduction in the size of a tumor, a reduction in the invasiveness of a tumor, reduction in the growth rate of the cancer, or a reduction in the rate of metastasis or recurrence. Treatment of cancer may also refer to prolonging survival of a subject with cancer.

[0338] The phrases “pharmaceutical or pharmacologically acceptable” refers to molecular entities and compositions that do not produce an adverse, allergic, or other untoward reaction when administered to an animal, such as a human, as appropriate. For animal (e.g., human) administration, it will be understood that preparations should meet sterility, pyrogenicity, general safety, and purity standards as required, e.g., by the FDA Office of Biological Standards.

[0339] As used herein, “pharmaceutically acceptable carrier” includes any and all aqueous biocompatible solvents (e.g., saline solutions, phosphate buffered saline, parenteral vehicles, such as sodium chloride, Ringer's dextrose, etc.), antioxidants, preservatives (e.g., antibacterial or antifungal agents, anti-oxidants, chelating agents, and inert gases), isotonic agents, such like materials and combinations thereof, as would be known to one of ordinary skill in the art. The pH and exact concentration of the various components in a pharmaceutical composition are adjusted according to well-known parameters.

[0340] The term “bulged adenosine” (also known as bulged A) as used herein refer to residue within the intron sequence as the initiating nucleophile. The conventional group II-type bulged adenosine is located on domain 6 (D6, or DVI) of a group II intron. In some group II introns, the bulged adenosine is 7 or 8 nucleotides away from the 3′ splicing site. The bulged adenosine is normally conserved and plays a central role in the splicing process. During this process, The 2′ hydroxyl of the bulged adenosine attacks the 5′ splice site, followed by nucleophilic attack on the 3′ splice site by the 3′ OH of the upstream exon. This results in a branched intron lariat connected by a 2′ phosphodiester linkage at the bulged adenosine (Van der Veen et al., The EMBO Journal, 6(12):3827-3831 (1987); Jacquier et al., Journal of molecular biology, 219(3): 415-428 (1991); Daniels et al., Journal of molecular biology, 256(1):31-49 (1996)).

[0341] The term “atypical bulged adenosine” (also known as atypical bulged A) as used herein refer to a region found within D6 of a group JIB intron C.te.I1 (Cte), found in the in the human pathogen Clostridium tetani. D6 of Cte does not have a clearly bulged adenosine. Instead, it has a looped region, see FIGS. 2A-2E, which acts as the nucleophile for the first step of splicing (the branching pathway). (McNeil et al., RNA, 20(6):855-866 (2014))

[0342] The term “catalytic triad” as used herein refer to a highly conserved region (AGC) which forms base triples with other nucleotides to form a triple helix known as the “catalytic triplex”. This catalytic triplex forms the binding pocket for the two active site magnesium ions. (Chan et al. Nature Comm. 9.1 (2018): 1-10.)

[0343] The terms “scar,” as used herein, refers to the non-target sequence region in the circRNA splicing product. The term “scarless splicing” as used herein refers to the self-splicing of the cRNAzymes which produce circRNAs that do not contain additional sequence elements beyond the target sequence. As such, a “scarless” circRNA contains no scar, meaning that it solely consists of the target sequence. The term “near-scarless splicing” as used herein refers to the self-splicing of the cRNAzymes which produce circRNAs that include no more than 20 nucleotides besides the target sequence. A “near-scarless circRNA” is a circRNA resulting from “near-scarless” self-splicing of a cRNAzyme, which include no more than 20 nucleotides besides the target sequence.

[0344] The term “in vitro transcription,” or “IVT,” refers to versatile method to produce RNA in vitro that uses an RNA polymerase, ribonucleotides, and appropriate buffer conditions to synthesize RNA from a DNA template.

[0345] The term “resulting target sequence,” as used herein, refers to the target sequence as it is formed in the circRNA upon self-splicing of the RNAs (or cRNAzymes) provided herein.

### 8.2. Cap-Independent Translation Initiation Elements

[0346] In some embodiments, provided herein is an RNA polynucleotide comprising an engineered translation initiation element (TI) comprising an internal ribosome entry site (IRES)-like polynucleotide sequence. In some embodiments, the IRES-like polynucleotide sequence can mediate cap-independent translation initiation.

[0347] Translation initiation of mRNAs in eukaryotic cells is a complex process that involves the concerted interaction of numerous factors (Pain (1996) Eur. J. Biochem. 236, 747-771). For most mRNAs, the first step is the recruitment of ribosomal 40S subunits onto the mRNA at or near the capped 5′ end. Association of 40S to mRNA is greatly facilitated by the cap-binding protein complex eIF4F. Factor eIF4F is composed of three subunits: the RNA helicase eIF4A, the cap-binding protein eIF4E, and the multi-adaptor protein eIF4G which acts as a scaffold for the proteins in the complex and has binding sites for eIF4E, eIF4a, eIF3, and poly(A) binding protein.

[0348] Circular RNA is a type of single-stranded, covalently closed-loop RNA, and does not contain the 5′ cap that is commonly known to be required for cap-dependent translation. Thus, circular RNA translation utilizes alternate mechanisms to initiate cap-independent translation, such as the use of an internal ribosome entry site (IRES) sequence that is recognized by ribosomes. See, e.g., Wesselhoeft, R. A. et al., Nat. Commun. 9, 2629 (2018) and Chinese Patent Application No. 202110594352.4.

### 8.2.1. Natural Internal Ribosome Entry Site (IRES) Sequences

[0349] In some embodiments, the RNA polynucleotide, the precursor RNA, and the circular RNA provided herein comprises a natural internal ribosome entry site (IRES) sequence. In some embodiments, the IRES sequence is an RNA sequence capable of engaging a ribosome (e.g., eukaryotic ribosome). An IRES sequence permits the translation of one or more open reading frames from a circular RNA (e.g., open reading frames that form the expression sequence). The IRES attracts a ribosomal (e.g., eukaryotic ribosomal) translation initiation complex and promotes translation initiation.

[0350] A multitude of natural IRES sequences are available and include sequences derived from or isolated from a wide variety of viruses, such as from leader sequences of piconaviruses such as the encephalomyocarditis virus (EMCV) UTR, the polio leader sequence, the hepatitis A virus leader sequence, the hepatitis C virus IRES, human rhinovirus type 2 IRES, an IRES element from the foot and mouth disease virus, a giardiavirus IRES, and the like.

[0351] In some embodiments, the natural IRES sequence is isolated or derived from an IRES sequence of Taura syndrome virus, Tiiatoma virus, Theiler's encephalomyelitis virus, Simian Virus 40, Solenopsis invicta virus 1, Rhopalosiphum padi virus, Reticuloendotheliosis virus, Human poliovirus 1, Plautia stall intestine virus, Kashmir bee virus, Human rhinovirus 2, Homalodisca coagulata virus-1, Human Immunodeficiency Virus type 1, Himetobi P virus, Hepatitis C virus, Hepatitis A virus, Hepatitis A Virus HA 16, Hepatitis GB virus, Foot and mouth disease virus, Human enterovirus 71, Equine rhinitis virus, Ectrapis obliqua picoma-like virus, Encephalomyocarditis virus, Drosophila C Virus, Human coxsackievirus B3, Crucifer tobamovirus, Cricket paralysis virus, Bovine viral diarrhea virus 1, Black Queen Cell Virus, Aphid lethal paralysis virus, Avian encephalomyelitis virus, Acute bee paralysis virus, Hibiscus chlorotic ringspot virus, Classical swine fever virus, tobacco etch virus, turnip crinkle virus, EMCV-A, EMCV-B, EMCV-Bf, EMCV-Cf, EMCV pEC9, Picobimavirus, HCV QC64, Human Cosavirus E/D, Human Cosavirus F, Human Cosavirus JMY, Rhinovirus NAT001, HRV14, HRV89, HRVC-02, HRV-A21, Salivirus A SHI, Salivirus FHB, Salivirus NG-J1, Human Parechovirus 1, Crohivirus B, Yc-3, Rosavirus M-7, Shanbavirus A, Pasivirus A, Pasivirus A 2, Echovirus E14, Human Parechovirus 5, Aichi Virus, Phopivirus, CVA10, Enterovirus C, Enterovirus D, Enterovirus J, Human Pegivirus 2, GBV-C GT110, GBV-C K1737, GBV-C Iowa, Pegivirus A 1220, Pasivirus A 3, Sapelovirus, Rosavirus B, Bakunsa Virus, Tremovirus A, Swine Pasivirus 1, PLV-CHN, Pasivirus A, Sicinivirus, Hepacivirus K, Hepacivirus A, BVDV1, Border Disease Virus, BVDV2, CSFV-PK15C, SF573 Dicistravirus, Hubei Picoma-like Virus, CRPV, Salivirus A BN5, Salivirus A BN2, Salivirus A 02394, Salivirus A GUT, Salivirus A CH, Salivirus A SZ1, Salivirus FHB, Coxsackievirus (e.g., CVA3, CVA12, CVB1, CVB3, CVB5), Echovirus 7, Enterovirus A71, and/or EV24.

[0352] In some embodiments, a natural IRES sequence is isolated or derived from a eukaryotic IRES element selected from Human FGF2, Human SFTPA1, Human AML1/RUNX1, Drosophila antennapedia, Human AQP4, Human AT1R, Human BAG-1, Human BCL2, Human BiP, Human c-IAP1, Human c-myc, Human eIF4G, Mouse NDST4L, Human LEF1, Mouse HIFI alpha, Human n.myc, Mouse Gtx, Human p27kip1, Human PDGF2/c-sis, Human p53, Human Pim-1, Mouse Rbm3, Drosophila reaper, Canine Scamper, Drosophila Ubx, Human UNR, Mouse UtrA, Human VEGF-A, Human XIAP, Drosophila hairless, S. cerevisiae TFIID, and S. cerevisiae YAP1.

[0353] In some embodiments, a natural IRES sequence is an endogenous IRES sequence, which is derived from or isolated from Homo sapiens. In some embodiments, a natural IRES sequence is an endogenous IRES sequence, which is derived from or isolated from human tissue or human sample.

[0354] In some embodiments, an IRES sequence is isolated or derived from a cellular IRES element selected from AML1/RUNX1, Antp-D, Antp-DE, Antp-CDE, AT1R var1, AT1R_var2, AT1R_var3, AT1R_var4, BAG1_p36delta236nt, BAG1_p36, BiP_-222_-3, C-IAP1 285-1399, c IAP1 13 13-1462, c-jun, Cat-1_224, CCND1, eIF4GI-ext, eIF4GII, eIF4GII-long, FGF1A, FMR1, Gtx-133-141, Gtx-1-166, Gtx-1-120, Gtx-1-196, HAP4, HIF1a, hSNM1, Hsp1O1, hsp70, hsp70, Hsp90, IGF2_leader2, L-myc, MNT 75-267, MNT 36-160, MTG8a, MYB, MYT2 997-1 152, NRF_-653_-17, NtHSF1, ODC1, p27kip1, p53_128-269, PDGF2/c-sis, PITSLRE_p58, Rbm3,reaper, Scamper, TFIID, TIF4631, Ubx_1-966, Ubx_373-961, UNR, Ure2, XIAP 5-464, XIAP 305-466,YAP1, (GAAA)16, (PPT19)4 and XI.

[0355] In some embodiments, an IRES sequence is isolated or derived from a viral IRES element selected from ABPV IGRpred, AEV, ALPV IGRpred, BQCV IGRpred, BVDV1 1-385, BVDV1 29-391, CrPV 5NCR, CrPV IGR, crTMV_IRESmp228, CSFV, DCV IGR, EoPV_5NTR, ERBV_162-920, EV71_l-748, FMDV type C, GBV-A, GBV-C, HAV HM175, HiPVJGRpred, HIV-1, HoCV1JGRpred, IAPVJGRpred, idefix, KBV IGRpred, PSIV IGR, PV type1 Mahoney, PV_type3_Leon, REV-A, RhPV 5NCR, RhPV IGR, SINV1 IGRpred, SV40 661-830, TMEV, TMV_UI_IRESmp228, TRV 5NTR, TrV IGR, TSV, and IGR.

[0356] In some embodiments, the IRES sequence of the present disclosure comprises a sequence isolated or derived from a natural IRES sequence. Exemplary natural IRES sequences include but are not limited to those listed in Tables 98-100. In some embodiments, the IRES sequence comprises a nucleic acid sequence that is at least 90%, at least 91%, at least 92%, at least 93%, at least 94%, at least 95%, at least 96%, at least 97%, at least 98%, at least 99% or at least 100% identical to the nucleic acid sequence of the natural IRES sequences of Tables 98-100 or a functional portion thereof.

### 8.2.2. IRES-Like Sequences

[0357] In some embodiments, the RNA polynucleotide, the precursor RNA, and the circular RNA provided herein comprise an IRES-like sequence. As used herein, the term “IRES-like sequence” refers to a synthetic or artificial IRES sequence that has the function of a natural IRES sequence. In some embodiments, the IRES-like sequence is an RNA sequence capable of recruiting a ribosome (e.g., eukaryotic ribosome). In some embodiments, the IRES-like sequence is an RNA sequence capable of mediating cap-independent translation initiation. An IRES-like sequence may be identified by any one of the methods disclosed herein.

[0358] In some embodiments the IRES-like sequence is greater than or equal to 3 nucleic acid residues in length. In some embodiments, the IRES-like sequence is 3-300 nucleic acid residues in length. In some embodiments, the IRES-like sequence is 3-200 nucleic acid residues in length. In some embodiments, the IRES-like sequence is 4-200 nucleic acid residues in length. In some embodiments, the IRES-like sequence is 5-200 nucleic acid residues in length. In some embodiments, the IRES-like sequence is 6-200 nucleic acid residues in length. In some embodiments, the IRES-like sequence is 7-200 nucleic acid residues in length. In some embodiments, the IRES-like sequence is 3-100 nucleic acid residues in length. In some embodiments, the IRES-like sequence is 4-100 nucleic acid residues in length. In some embodiments, the IRES-like sequence is 5-100 nucleic acid residues in length. In some embodiments, the IRES-like sequence is 6-100 nucleic acid residues in length. In some embodiments, the IRES-like sequence is 7-100 nucleic acid residues in length. In some embodiments, the IRES-like sequence is 3-50 nucleic acid residues in length. In some embodiments, the IRES-like sequence is 4-50 nucleic acid residues in length. In some embodiments, the IRES-like sequence is 5-50 nucleic acid residues in length. In some embodiments, the IRES-like sequence is 6-50 nucleic acid residues in length. In some embodiments, the IRES-like sequence is 7-50 nucleic acid residues in length. In some embodiments, the IRES-like sequence is 3-40 nucleic acid residues in length. In some embodiments, the IRES-like sequence is 4-40 nucleic acid residues in length. In some embodiments, the IRES-like sequence is 5-40 nucleic acid residues in length. In some embodiments, the IRES-like sequence is 6-40 nucleic acid residues in length. In some embodiments, the IRES-like sequence is 7-40 nucleic acid residues in length. In some embodiments, the IRES-like sequence is 3-30 nucleic acid residues in length. In some embodiments, the IRES-like sequence is 4-30 nucleic acid residues in length. In some embodiments, the IRES-like sequence is 5-30 nucleic acid residues in length. In some embodiments, the IRES-like sequence is 6-30 nucleic acid residues in length. In some embodiments, the IRES-like sequence is 7-30 nucleic acid residues in length. In some embodiments, the IRES-like sequence is 3-20 nucleic acid residues in length. In some embodiments, the IRES-like sequence is 4-20 nucleic acid residues in length. In some embodiments, the IRES-like sequence is 5-20 nucleic acid residues in length. In some embodiments, the IRES-like sequence is 6-20 nucleic acid residues in length. In some embodiments, the IRES-like sequence is 7-20 nucleic acid residues in length. In some embodiments, IRES-like sequence is 3, 4, 5, 6, 7, 8, 9, 10, 11, 12, 13, 14, 15, 16, 17, 18, 19, 20, 21, 22, 23, 24, 25, 26, 27, 28, 29, 30, 31, 32, 33, 34, 35, 36, 37, 38, 39, 40, 41, 42, 43, 44, 45, 46, 47, 48, 49, 50, 51, 52, 54, 55, 56, 57, 58, 59, 60, 61, 62, 63, 64, 65, 66, 67, 68, 69, 70, 81, 82, 83, 84, 85, 86, 87, 88, 89, 90, 91, 92, 93, 94, 95, 96, 97, 98, 99, or 100 nucleic acid residues in length. In some embodiments, the IRES-like sequence is 5 nucleic acid residues in length. In some embodiments, the IRES-like sequence is 6 nucleic acid residues in length. In some embodiments, the IRES-like sequence is 7 nucleic acid residues in length. In some embodiments, the IRES-like sequence is 8 nucleic acid residues in length. In some embodiments, the IRES-like sequence is 9 nucleic acid residues in length. In some embodiments, the IRES-like sequence is 10 nucleic acid residues in length. In some embodiments, the IRES-like sequence is 11 nucleic acid residues in length. In some embodiments, the IRES-like sequence is 12 nucleic acid residues in length.

[0359] Exemplary IRES-like sequences of the present disclosure include but are not limited to those listed in Tables 2-96, 110 and 112. In some embodiments, the IRES-like sequence comprises a nucleic acid sequence that is at least 90%, at least 91%, at least 92%, at least 93%, at least 94%, at least 95%, at least 96%, at least 97%, at least 98%, at least 99% or at least 100% identical to the nucleic acid sequence of the IRES-like sequences of Tables 2-96, 110 and 112 or a functional portion thereof.

[0360] In some embodiments, the IRES-like sequence described herein or a portion thereof may be combined with a natural IRES sequence described herein or a portion thereof, to form further IRES-like sequences. In some embodiments, a complete natural IRES sequence is combined with a complete IRES-like sequence. In some embodiments, a portion of a natural IRES sequence is combined with a complete IRES-like sequence. In some embodiments, a complete natural IRES sequence is combined with a portion of an IRES-like sequence. In some embodiments, a portion of a natural IRES sequence is combined with a portion of an IRES-like sequence. Exemplary sequences comprising a portion of a natural IRES sequence combined with a portion of a IRES-like sequence include but are not limited to those listed in Table 97.

### 8.2.2.1. Methods of Generating IRES-Like Sequences

[0361] (a) The disclosure provides a method for generating an IRES-like polynucleotide sequence, the method comprising the steps of: generating a polynucleotide query sequence consisting of X nucleic acid residues in length (i.e., X-mer), wherein X is an integer greater than or equal to 3;
[0362] (b) generating X−Y+1 number of overlapping polynucleotide fragment sequences within the polynucleotide query sequence,
[0363] wherein each polynucleotide fragment sequence consists of Y nucleic acid residues in length,
[0364] wherein the first position of each polynucleotide fragment sequence is n and the last position of the same polynucleotide fragment sequence is Y+n−1, and
[0365] wherein n represents each positive integer between 1 and X−Y+1;
[0366] (c) determining an enrichment score for each polynucleotide fragment sequence of (b);
[0367] (d) determining a numerical score for the polynucleotide query sequence by summing the enrichment scores of each polynucleotide fragment sequence of (c); and
[0368] (e) identifying the polynucleotide query sequence as an engineered IRES-like polynucleotide sequence according to a reference value.

[0369] In some embodiments, the reference value is determined as described herein, for example, in 8.2.2.1.a. Generating Polynucleotide Query Sequences 8.2.2.1.b. Generating Overlapping Polynucleotide Subsequences within the Query Sequences.

[0370] In some embodiments, the reference value is characteristic of the absence of a therapeutic product expression.

[0371] In some embodiments, the reference value is the average score of all of the numerical scores of two or more IRES-like polynucleotide sequences or two or more natural IRES sequence or a combination thereof.

[0372] In some embodiments, the reference value is about 95%, about 90%, about 85%, about 80%, about 75%, about 70%, about 65%, about 60%, about 55%, about 50%, about 45%, about 40%, about 35%, about 30%, about 25%, about 20%, about 15%, about 10%, about 9%, about 8%, about 7%, about 6%, about 5%, about 4%, about 3%, about 2%, about 1%, about 0.9%, about 0.8%, about 0.7%, about 0.6%, about 0.5%, about 0.4%, about 0.3%, about 0.2%, or about 0.1% of the highest numerical score of two or more IRES-like polynucleotide sequences or two or more natural IRES sequence or a combination thereof.

[0373] In some embodiments, the reference value is about 50%, about 45%, about 40%, about 35%, about 30%, about 25%, about 20%, about 15%, or about 10% of the highest numerical score of two or more IRES-like polynucleotide sequences or two or more natural IRES sequence or a combination thereof.

[0374] In some embodiments, the reference value is at least about 95%, about 90%, about 85%, about 80%, about 75%, about 70%, about 65%, about 60%, about 55%, about 50%, about 45%, about 40%, about 35%, about 30%, about 25%, about 20%, about 15%, about 10%, about 9%, about 8%, about 7%, about 6%, about 5%, about 4%, about 3%, about 2%, about 1%, about 0.9%, about 0.8%, about 0.7%, about 0.6%, about 0.5%, about 0.4%, about 0.3%, about 0.2%, or about 0.1% higher than the lowest numerical score of two or more IRES-like polynucleotide sequences or two or more natural IRES sequence or a combination thereof.

[0375] In some embodiments, the reference value is at least about 95%, about 90%, about 85%, about 80%, about 75%, about 70%, about 65%, about 60%, about 55%, about 50% higher than the lowest numerical score of two or more IRES-like polynucleotide sequences or two or more natural IRES sequence or a combination thereof.

[0376] In some embodiments, the reference value is greater than or equal to 0.

[0377] In some embodiments, the numerical score for the polynucleotide query sequence is calculated using a system of equations, wherein the numerical score for the polynucleotide query sequence is greater or equal to 0.

[0378] The number of nucleic acid residues in the polynucleotide query sequence (i.e., X) is described in detail herein, e.g., 8.2.2.1.a. Generating Polynucleotide Query Sequences and 8.2.2.1.b. Generating Overlapping Polynucleotide Subsequences within the Query Sequences.

[0379] In some embodiments, X is an integer selected from 3-300. In some embodiments, X is an integer selected from 3-100. In some embodiments, X is an integer selected from 5-100. In some embodiments, X is an integer selected from 6-100. In some embodiments, X is an integer greater than or equal to 5. In some embodiments, X is an integer greater than or equal to 6.

[0380] In some embodiments, the polynucleotide query sequence is generated within a DNA vector suitable for synthesizing the polynucleotide query sequence. In some embodiments, the polynucleotide query sequence is chemically synthesized.

[0381] In some embodiments, the enrichment score for a polynucleotide fragment sequence is determined by: i) generating a expression plasmid library, wherein each expression plasmid of the library comprises a different polynucleotide fragment sequence and a reporter gene, ii) contacting a population of cells with the expression plasmid library; iii) quantifying the expression level of the reporter gene corresponding to each expression plasmid of the expression plasmid library; iv) dividing the total population of cells into a first population and a second population based on the protein expression levels of iii); v) determining an enrichment score for the polynucleotide fragment sequence.

[0382] The enrichment score for a polynucleotide fragment sequence can be determined according to the methods described herein, e.g., 8.2.2.1.c. Determining an Enrichment Score.

[0383] The numerical score for the polynucleotide query sequence can be determined according to the methods described herein, e.g., 8.2.2.1.d. Determining a Numerical Score of a Polynucleotide Sequence and Identifying an IRES-like Sequence.

### 8.2.2.1.a. Generating Polynucleotide Query Sequences

[0384] A random polynucleotide query sequence library may be generated by any suitable method known in the art or described herein. In some embodiments, the random polynucleotide query sequence (e.g., RNA polynucleotide) is generated using any DNA vector suitable for synthesizing the polynucleotide query sequence. In some embodiments, the random polynucleotide query sequence (e.g., RNA polynucleotide) is generated by chemical synthesis, error-prone PCR, or reverse-transcription PCR of transcriptome. For example, to produce a random 10-mer sequence library, a foldback primer (ATTCCGTCTCAAGTAANNNNNNNNNNATCATGGAGACGCACTGTTTTTTTCAGTGCGTCTCCATGA (SEQ ID NO: 15342)) may be generated using Klenow fragment (NEB), and the resulting DNA may be digested with BsmBI and ligated into BsmBI digested pcircGFP-BsmBI. The ligation product may be transformed into ElectroMax DH-5a (Invitrogen), to produce E. coli clones to achieve ˜2-fold coverage of all possible DNA decamers (total 2 million clones).

[0385] In some embodiments the random polynucleotide query sequence is greater than or equal to 3 residues in length. In some embodiments, the random polynucleotide query sequence is 3-300 nucleic acid residues in length. In some embodiments, the random polynucleotide query sequence is 3-200 nucleic acid residues in length. In some embodiments, the random polynucleotide query sequence is 3-100 nucleic acid residues in length. In some embodiments, the random polynucleotide query sequence is 5-100 nucleic acid residues in length. In some embodiments, the random polynucleotide query sequence is 6-100 nucleic acid residues in length. In some embodiments, the random polynucleotide query sequence is 7-100 nucleic acid residues in length. In some embodiments, the random polynucleotide query sequence is 7-90 nucleic acid residues in length. In some embodiments, the random polynucleotide query sequence is 7-80 nucleic acid residues in length. In some embodiments, the random polynucleotide query sequence is 7-70 nucleic acid residues in length. In some embodiments, the random polynucleotide query sequence is 7-60 nucleic acid residues in length. In some embodiments, the random polynucleotide query sequence is 7-50 nucleic acid residues in length. In some embodiments, the random polynucleotide query sequence is 7-40 nucleic acid residues in length. In some embodiments, the random polynucleotide query sequence is 7-30 nucleic acid residues in length. In some embodiments, the random polynucleotide query sequence is 7-20 nucleic acid residues in length. In some embodiments, the random polynucleotide query sequence is 7-15 nucleic acid residues in length. In some embodiments, the random polynucleotide query sequence is 6-90 nucleic acid residues in length. In some embodiments, the random polynucleotide query sequence is 6-80 nucleic acid residues in length. In some embodiments, the random polynucleotide query sequence is 6-70 nucleic acid residues in length. In some embodiments, the random polynucleotide query sequence is 6-60 nucleic acid residues in length. In some embodiments, the random polynucleotide query sequence is 6-50 nucleic acid residues in length. In some embodiments, the random polynucleotide query sequence is 6-40 nucleic acid residues in length. In some embodiments, the random polynucleotide query sequence is 6-30 nucleic acid residues in length. In some embodiments, the random polynucleotide query sequence is 6-20 nucleic acid residues in length. In some embodiments, the random polynucleotide query sequence is 6-15 nucleic acid residues in length.

[0386] In some embodiments, the random polynucleotide query sequence is at least 5 nucleic acid residues in length. In some embodiments, the random polynucleotide query sequence is at least 6 nucleic acid residues in length. In some embodiments, the random polynucleotide query sequence is at least 7 nucleic acid residues in length. In some embodiments, the random polynucleotide query sequence is at least 8 nucleic acid residues in length. In some embodiments, the random polynucleotide query sequence is at least 9 nucleic acid residues in length. In some embodiments, the random polynucleotide query sequence is at least 10 nucleic acid residues in length. In some embodiments, the random polynucleotide query sequence is at least 11 nucleic acid residues in length. In some embodiments, the random polynucleotide query sequence is at least 12 nucleic acid residues in length. In some embodiments, the random polynucleotide query sequence is at least 13 nucleic acid residues in length. In some embodiments, the random polynucleotide query sequence is at least 14 nucleic acid residues in length. In some embodiments, the random polynucleotide query sequence is at least 15 nucleic acid residues in length. In some embodiments, the random polynucleotide query sequence is at least 16 nucleic acid residues in length. In some embodiments, the random polynucleotide query sequence is at least 17 nucleic acid residues in length. In some embodiments, the random polynucleotide query sequence is at least 18 nucleic acid residues in length. In some embodiments, the random polynucleotide query sequence is at least 19 nucleic acid residues in length. In some embodiments, the random polynucleotide query sequence is at least 20 nucleic acid residues in length.

[0387] In some embodiments, the random polynucleotide query sequence is 3, 4, 5, 6, 7, 8, 9, 10, 11, 12, 13, 14, 15, 16, 17, 18, 19, 20, 21, 22, 23, 24, 25, 26, 27, 28, 29, 30, 31, 32, 33, 34, 35, 36, 37, 38, 39, 40, 41, 42, 43, 44, 45, 46, 47, 48, 49, 50, 51, 52, 54, 55, 56, 57, 58, 59, 60, 61, 62, 63, 64, 65, 66, 67, 68, 69, 70, 81, 82, 83, 84, 85, 86, 87, 88, 89, 90, 91, 92, 93, 94, 95, 96, 97, 98, 99, or 100 nucleic acid residues in length. In some embodiments, the random polynucleotide query sequence is 5, 6, 7, 8, 9, 10, 11, 12, 13, 14, 15, 16, 17, 18, 19, 20, 21, 22, 23, 24, 25, 26, 27, 28, 29, 30, 31, 32, 33, 34, 35, 36, 37, 38, 39, 40, 41, 42, 43, 44, 45, 46, 47, 48, 49, 50, 51, 52, 54, 55, 56, 57, 58, 59, 60, 61, 62, 63, 64, 65, 66, 67, 68, 69, 70, 81, 82, 83, 84, 85, 86, 87, 88, 89, 90, 91, 92, 93, 94, 95, 96, 97, 98, 99, or 100 nucleic acid residues in length. In some embodiments, the random polynucleotide query sequence is 6, 7, 8, 9, 10, 11, 12, 13, 14, 15, 16, 17, 18, 19, 20, 21, 22, 23, 24, 25, 26, 27, 28, 29, 30, 31, 32, 33, 34, 35, 36, 37, 38, 39, 40, 41, 42, 43, 44, 45, 46, 47, 48, 49, 50, 51, 52, 54, 55, 56, 57, 58, 59, 60, 61, 62, 63, 64, 65, 66, 67, 68, 69, 70, 81, 82, 83, 84, 85, 86, 87, 88, 89, 90, 91, 92, 93, 94, 95, 96, 97, 98, 99, or 100 nucleic acid residues in length. In some embodiments, the random polynucleotide query sequence is 7, 8, 9, 10, 11, 12, 13, 14, 15, 16, 17, 18, 19, 20, 21, 22, 23, 24, 25, 26, 27, 28, 29, 30, 31, 32, 33, 34, 35, 36, 37, 38, 39, 40, 41, 42, 43, 44, 45, 46, 47, 48, 49, 50, 51, 52, 54, 55, 56, 57, 58, 59, 60, 61, 62, 63, 64, 65, 66, 67, 68, 69, 70, 81, 82, 83, 84, 85, 86, 87, 88, 89, 90, 91, 92, 93, 94, 95, 96, 97, 98, 99, or 100 nucleic acid residues in length. In some embodiments, the random polynucleotide query sequence is 5 nucleic acid residues in length. In some embodiments, the random polynucleotide query sequence is 6 nucleic acid residues in length. In some embodiments, the random polynucleotide query sequence is 7 nucleic acid residues in length. In some embodiments, the random polynucleotide query sequence is 8 nucleic acid residues in length. In some embodiments, the random polynucleotide query sequence is 9 nucleic acid residues in length. In some embodiments, the random polynucleotide query sequence is 10 nucleic acid residues in length. In some embodiments, the random polynucleotide query sequence is 11 nucleic acid residues in length. In some embodiments, the random polynucleotide query sequence is 12 nucleic acid residues in length. In some embodiments, the random polynucleotide query sequence is 13 nucleic acid residues in length. In some embodiments, the random polynucleotide query sequence is 14 nucleic acid residues in length. In some embodiments, the random polynucleotide query sequence is 15 nucleic acid residues in length. In some embodiments, the random polynucleotide query sequence is 16 nucleic acid residues in length. In some embodiments, the random polynucleotide query sequence is 17 nucleic acid residues in length. In some embodiments, the random polynucleotide query sequence is 18 nucleic acid residues in length. In some embodiments, the random polynucleotide query sequence is 19 nucleic acid residues in length. In some embodiments, the random polynucleotide query sequence is 20 nucleic acid residues in length.

[0388] In some embodiments, a random polynucleotide query sequence library is constructed using a primer with a random region. In some embodiments, the primer with a random region is a foldback primer. In some embodiments, a random polynucleotide query sequence library is constructed using the method described in Fan et. al. 2020 (doi: https://doi.org/10.1101/473207). In some embodiments, a random polynucleotide query sequence library is constructed with a foldback primer which comprises a random region. In some embodiments, the foldback primer is extended with a DNA polymerase or DNA polymerase fragment. In some embodiments, the DNA polymerase fragment is a Klenow fragment. In some embodiments, the DNA polymerase is a Taq polymerase.

[0389] In some embodiments, the random region of the primer or the foldback primer is 5-mer, 6-mer, 7-mer, 8-mer, 9-mer, 10-mer, 11-mer, 12-mer, 13-mer, 14-mer, 15-mer, 16-mer, 17-mer, 18-mer, 19-mer, 20-mer, 21-mer, 22-mer, 23-mer, 24-mer, 25-mer, 26-mer, 27-mer, 28-mer, 29-mer, 30-mer, 31-mer, 32-mer, 33-mer, 34-mer, 35-mer, 36-mer, 37-mer, 38-mer, 39-mer, 40-mer, 41-mer, 42-mer, 43-mer, 44-mer, 45-mer, 46-mer, 47-mer, 48-mer, 49-mer, 50-mer, 51-mer, 52-mer, 54-mer, 55-mer, 56-mer, 57-mer, 58-mer, 59-mer, 60-mer, 61-mer, 62-mer, 63-mer, 64-mer, 65-mer, 66-mer, 67-mer, 68-mer, 69-mer, 70-mer, 81-mer, 82-mer, 83-mer, 84-mer, 85-mer, 86-mer, 87-mer, 88-mer, 89-mer, 90-mer, 91-mer, 92-mer, 93-mer, 94-mer, 95-mer, 96-mer, 97-mer, 98-mer, 99-mer, or 100-mer in length. In some embodiments, the random region of the foldback primer is a 10-mer in length. In some embodiments, the random region of the foldback primer is a 11-mer in length. In some embodiments, the random region of the foldback primer is a 12-mer in length. In some embodiments, the random region of the foldback primer is a 13-mer in length. In some embodiments, the random region of the foldback primer is a 14-mer length. In some embodiments, the random region of the foldback primer is 15-mer in length.

[0390] In some embodiments, the foldback primer comprises or consists of sequence of ATTCCGTCTCAAGTAANNNNNNNNNNATCATGGAGACGCACTGTTTTTTTCAGTGCGTCTCCATGA (SEQ ID NO: 15342), wherein “N” designates any nucleic acid residue.

[0391] In some embodiments, the resulting PCR product is ligated upstream of an expression cassette (e.g., encoding a reporter protein). In some embodiments, the resulting PCR product from a foldback primer is digested with restriction digestion enzyme(s) and ligated into an expression vector with an expression cassette (e.g., encoding a reporter protein).

[0392] Any suitable expression vector known in the art or described herein may be used. One of skill in the art would be well-equipped to construct an expression vector through standard recombinant techniques (see, for example, Sambrook et al., 2001(supra) and Ausubel et al., 1996 (supra), both incorporated herein by reference) for the expression of the random polynucleotide query sequences of the present disclosure. Vectors include but are not limited to, plasmids, cosmids, viruses (bacteriophage, animal viruses, and plant viruses), and artificial chromosomes (e.g., YACs), such as retroviral vectors (e.g., derived from Moloney murine leukemia virus vectors (MoMLV), MSCV, SFFV, MPSV, SNV, etc.), lentiviral vectors (e.g., derived from HIV-1, HIV-2, SIV, BIV, FIV, etc.), adenoviral (Ad) vectors including replication competent, replication deficient and gutless forms thereof, adeno-associated viral (AAV) vectors, simian virus 40 (SV-40) vectors, bovine papilloma virus vectors, Epstein-Barr virus vectors, yeast-based vectors, bovine papilloma virus (BPV)-based vectors, herpes virus vectors, vaccinia virus vectors, Harvey murine sarcoma virus vectors, murine mammary tumor virus vectors, Rous sarcoma virus vectors, parvovirus vectors, polio virus vectors, vesicular stomatitis virus vectors, maraba virus vectors and group B adenovirus enadenotucirev vectors.

[0393] In some embodiments, the expression vector is pcircGFP-BsmBI vector (Fan et. al. 2020 (doi: https://doi.org/10.1101/473207). In some embodiments, the restriction digestion enzyme is BsmBI.

[0394] Any suitable reporter protein (e.g., a reporter protein encoded by the expression cassette) known in the art or described herein may be used. In some embodiments, cells containing a construct of the present disclosure (e.g., RNA polynucleotide having an IRES-like sequence and an expression cassette encoding a reporter protein) may be identified in vitro or in vivo by including a marker in the expression vector. Such markers would confer an identifiable change to the cell permitting easy identification of cells containing the expression vector. Generally, a selection marker is one that confers a property that allows for selection. A positive selection marker is one in which the presence of the marker allows for its selection, while a negative selection marker is one in which its presence prevents its selection. An example of a positive selection marker is a drug resistance marker (e.g., genes that confer resistance to neomycin, puromycin, hygromycin, DHFR, GPT, zeocin, and histidinol). Other types of markers including screenable markers such as GFP are also contemplated.

[0395] One of skill in the art would also know how to employ selection markers, possibly in conjunction with FACS analysis. The marker used is not believed to be important, so long as it is capable of being expressed simultaneously with the nucleic acid encoding a gene product. Further examples of selection and screenable markers are well known to one of skill in the art. In some embodiments, the reporter protein is a fluorescent protein. In some embodiments, the reporter protein is a green fluorescent protein (GFP).

### 8.2.2.1.b. Generating Overlapping Polynucleotide Subsequences within the Query Sequences

[0396] In some embodiments, a population of cells is contacted with the expression plasmid library. In some embodiments, the random polynucleotide query sequence expression plasmid library is transfected into a cell line to generate a population of cells. In some embodiments, the transfected cell line is a human cell line. In some embodiments, the transfected cell line is a human HEK293T cell line.

[0397] In some embodiments, the expression level of the reporter gene corresponding to each expression plasmid of the expression plasmid library is quantified. In some embodiments, the random polynucleotide query sequence expression plasmid library is transfected into a cell line to generate a population of cells and the levels of reporter protein expression from the plurality of cells within the population is determined.

[0398] In some embodiments, cells transfected with the plasmid library as described above are collected and sorted by reporter signal intensity (e.g., fluorescence intensity). In some embodiments, the reporter signal intensity is determined by fluorescence-activated cell sorting (FACS).

[0399] In some embodiments, the reporter signal intensity of the plurality of cells within the population is ranked. In some embodiments, the plurality of cells are separated in to two or more populations. In some embodiments, the plurality of cells are separated into at least a first population and a second population. In some embodiments, the plurality of cells are separated in to two populations (e.g., high and low reporter protein expression). In some embodiments, the plurality of cells are separated in to three populations (e.g., high, medium, and low reporter protein expression). In some embodiments, the plurality of cells are separated in to four populations (e.g., high, medium, low, and no reporter protein expression).

[0400] In some embodiments, a high expression population is determined by reporter protein signal intensity. In some embodiments, a high expression population consists of cells with reporter protein signal intensity in the top 0-0.1%, 0-0.2%, 0-0.3%, 0-0.4%, 0-0.5%, 0-0.6%, 0-0.7%, 0-0.8%, 0-0.9%, 0-1%, 0-1.1%, 0-1.2%, 0-1.3%, 0-1.4%, 0-1.5%, 0-1.6%, 0-1.7%, 0-1.8%, 0-1.9%, 0-2%, 0-2.1%, 0-2.2%, 0-2.3%, 0-2.4%, 0-2.5%, 0-2.6%, 0-2.7%, 0-2.8%, 0-2.9%, 0-3%, 0-3.1%, 0-3.2%, 0-3.3%, 0-3.4%, 0-3.5%, 0-3.6%, 0-3.7%, 0-3.8%, 0-3.9%, 0-4%, 0-4.1%, 0-4.2%, 0-4.3%, 0-4.4%, 0-4.5%, 0-4.6%, 0-4.7%, 0-4.8%, 0-4.9%, 0-5%, 0-5.1%, 0-5.2%, 0-5.3%, 0-5.4%, 0-5.5%, 0-5.6%, 0-5.7%, 0-5.8%, 0-5.9%, 0-6%, 0-6.1%, 0-6.2%, 0-6.3%, 0-6.4%, 0-6.5%, 0-6.6%, 0-6.7%, 0-6.8%, 0-6.9%, 0-7%, 0-7.1%, 0-7.2%, 0-7.3%, 0-7.4%, 0-7.5%, 0-7.6%, 0-7.7%, 0-7.8%, 0-7.9%, 0-8%, 0-8.1%, 0-8.2%, 0-8.3%, 0-8.4%, 0-8.5%, 0-8.6%, 0-8.7%, 0-8.8%, 0-8.9%, 0-9%, 0-9.1%, 0-9.2%, 0-9.3%, 0-9.4%, 0-9.5%, 0-9.6%, 0-9.7%, 0-9.8%, 0-9.9%, or 0-10% of the total population of cells rank ordered by reporter signal intensity. In some embodiments, the high expression population consists of cells with reporter protein signal intensity in the top about 0.1%, about 0.2%, about 0.3%, about 0.4%, about 0.5%, about 0.6%, about 0.7%, about 0.8%, about 0.9%, about 1%, about 2%, about 3%, about 4%, about 5%, about 6%, about 7%, about 8%, about 9%, or about 10% of the total population of cells rank ordered by reporter signal intensity. In some embodiments, the high expression population consists of cells with reporter protein signal intensity in the 0-10% of the total population of cells rank ordered by reporter signal intensity.

[0401] In some embodiments, a low expression population is determined by reporter protein signal intensity. In some embodiments, a low expression population consists of cells with reporter protein signal intensity in the bottom 0-0.1%, 0-0.2%, 0-0.3%, 0-0.4%, 0-0.5%, 0-0.6%, 0-0.7%, 0-0.8%, 0-0.9%, 0-1%, 0-1.1%, 0-1.2%, 0-1.3%, 0-1.4%, 0-1.5%, 0-1.6%, 0-1.7%, 0-1.8%, 0-1.9%, 0-2%, 0-2.1%, 0-2.2%, 0-2.3%, 0-2.4%, 0-2.5%, 0-2.6%, 0-2.7%, 0-2.8%, 0-2.9%, 0-3%, 0-3.1%, 0-3.2%, 0-3.3%, 0-3.4%, 0-3.5%, 0-3.6%, 0-3.7%, 0-3.8%, 0-3.9%, 0-4%, 0-4.1%, 0-4.2%, 0-4.3%, 0-4.4%, 0-4.5%, 0-4.6%, 0-4.7%, 0-4.8%, 0-4.9%, 0-5%, 0-5.1%, 0-5.2%, 0-5.3%, 0-5.4%, 0-5.5%, 0-5.6%, 0-5.7%, 0-5.8%, 0-5.9%, 0-6%, 0-6.1%, 0-6.2%, 0-6.3%, 0-6.4%, 0-6.5%, 0-6.6%, 0-6.7%, 0-6.8%, 0-6.9%, 0-7%, 0-7.1%, 0-7.2%, 0-7.3%, 0-7.4%, 0-7.5%, 0-7.6%, 0-7.7%, 0-7.8%, 0-7.9%, 0-8%, 0-8.1%, 0-8.2%, 0-8.3%, 0-8.4%, 0-8.5%, 0-8.6%, 0-8.7%, 0-8.8%, 0-8.9%, 0-9%, 0-9.1%, 0-9.2%, 0-9.3%, 0-9.4%, 0-9.5%, 0-9.6%, 0-9.7%, 0-9.8%, 0-9.9%, 0-10%, 0-11%, 0-12%, 0-13%, 0-14%, 0-15%, 0-16%, 0-17%, 0- 18%, 0-19%, 0-20%, 0-21%, 0-22%, 0-23%, 0-24%, 0-25%, 0-30%, 0-35%, 0-40%, 0-45%, 0-50%, 0-55%, 0-60%, 0-65%, 0-70%, 0-75%, 0-80%, 0-85%, 0-90%, 5-10%, 5-11%, 5-12%, 5-13%, 5-14%, 5-15%, 5-16%, 5-17%, 5-18%, 5-19%, 5-20%, 5-21%, 5-22%, 5-23%, 5-24%, 5-25%, 5-30%, 5-35%, 5-40%, 5-45%, 5-50%, 5-55%, 5-60%, 5-65%, 5-70%, 5-75%, 5-80%, 5-85%, 5-90%, 10-15%, 10-16%, 10-17%, 10-18%, 10-19%, 10-20%, 10-21%, 10-22%, 10-23%, 10-24%, 10-25%, 10-30%, 10-35%, 10-40%, 10-45%, 10-50%, 10-55%, 10-60%, 10-65%, 10-70%, 10-75%, 10-80%, 10-85%, or 10-90% of the total population of cells rank ordered by reporter signal intensity. In some embodiments, the low expression population consists of cells with reporter protein signal intensity in the bottom about 0.1%, about 0.2%, about 0.3%, about 0.4%, about 0.5%, about 0.6%, about 0.7%, about 0.8%, about 0.9%, about 1%, about 2%, about 3%, about 4%, about 5%, about 6%, about 7%, about 8%, about 9%, about 10%, about 15%, about 20%, about 25%, about 30%, about 35%, about 40%, about 45%, about 50%, about 55%, about 60%, about 65%, about 70%, about 75%, about 80%, about 85%, or about 90% of the total population of cells ranked ordered by reporter signal intensity.

[0402] In some embodiments, a medium expression population is determined by reporter protein signal intensity. In some embodiments, the low expression population consists of cells with reporter protein signal intensity in between about 49%-51%, 48%-52%, 47%-53%, 46%-54%, 45%-55%, 44%-56%, 43%-57%, 42%-58%, 41%-59%, 40%-60%, 39%-61%, 38%-62%, 37%-63%, 36%-64%, 35%-65%, 34%-66%, 33%-67%, 32%-68%, 31%-69%, 30%-70%, 29%-71%, 28%-72%, 27%-73%, 26%-74%, or 25%-75% of the total population of cells ranked ordered by reporter signal intensity. In some embodiments, the selected expression population consists of cells with reporter protein signal intensity in between about 49%-51%, 48%-52%, 47%-53%, 46%-54%, 45%-55%, 44%-56%, 43%-57%, 42%-58%, 41%-59%, 40%-60%, 39%-61%, 38%-62%, 37%-63%, 36%-64%, 35%-65%, 34%-66%, 33%-67%, 32%-68%, 31%-69%, 30%-70%, 29%-71%, 28%-72%, 27%-73%, 26%-74%, or 25%-75% of the total population of cells ranked ordered by reporter signal intensity.

[0403] In some embodiments, a population with no expression is determined by reporter protein signal intensity. In some embodiments, a no expression population consists of cells with reporter protein signal intensity in the bottom 0-5%, 0-10%, 0-15%, 0-20%, 0-25%, 0-30%, 0-35%, 0-40%, 0-45%, or 0-50% of the total population of cells rank ordered by reporter signal intensity. In some embodiments, the low expression population consists of cells with reporter protein signal intensity in the bottom about 0.1%, about 0.2%, about 0.3%, about 0.4%, about 0.5%, about 0.6%, about 0.7%, about 0.8%, about 0.9%, about 1%, about 2%, about 3%, about 4%, about 5%, about 6%, about 7%, about 8%, about 9%, about 10%, about 11%, about 12%, about 13%, about 14%, about 15%, about 16%, about 17%, about 18%, about 19%, about 20%, about 21%, about 22%, about 23%, about 24%, about 25%, about 30%, about 35%, about 40%, about 45%, or about 50% of the total population of cells ranked ordered by reporter signal intensity.

[0404] In some embodiments, a high expression population consists of cells with reporter protein signal intensity in the top 0-10% of the total population of cells ranked by reporter signal intensity and the low expression population consists of cells with reporter protein signal intensity in the bottom 0-90% of the total population of cells ranked by reporter signal intensity. In some embodiments, a high expression population consists of cells with reporter protein signal intensity in the top 0-5% of the total population of cells ranked by reporter signal intensity and the low expression population consists of cells with reporter protein signal intensity in the bottom 0-80% of the total population of cells ranked by reporter signal intensity. In some embodiments, a high expression population consists of cells with reporter protein signal intensity in the top 0-1% of the total population of cells ranked by reporter signal intensity and the low expression population consists of cells with reporter protein signal intensity in the bottom 0-75% of the total population of cells ranked by reporter signal intensity. In some embodiments, a high expression population consists of cells with reporter protein signal intensity in the top 0-0.5% of the total population of cells ranked by reporter signal intensity and the low expression population consists of cells with reporter protein signal intensity in the bottom 0-75% of the total population of cells ranked by reporter signal intensity. In some embodiments, a high expression population consists of cells with reporter protein signal intensity in the top about 0.5% of the total population of cells ranked by reporter signal intensity and the low expression population consists of cells with reporter protein signal intensity in the bottom about 75% of the total population of cells ranked by reporter signal intensity.

[0405] In some embodiments, a reference value for identifying a polynucleotide query sequence as an engineered IRES-like polynucleotide sequence is determined according to the reporter signal intensity, high expression population, and/or low expression population.

[0406] In some embodiments, a reference value for identifying a polynucleotide query sequence as an engineered IRES-like polynucleotide sequence is determined using the following formula: Reference Value=(23.75×length of the polynucleotide query sequence)−84.85−Z, wherein Z represents any number between 1 and 10000 and X represents the length of IRES-like polynucleotide sequence. In some embodiments, Z represents any number between 50 and 5000. In some embodiments, Z represents any number between 175 and 2500. In some embodiments, Z represents any number between 150 and 200.

[0407] In some embodiments, Z represents a number that is at least 1, at least 2, at least 3, at least 4, at least 5, at least 6, at least 7, at least 8, at least 9, at least 10, at least 20, at least 30, at least 40, at least 50, at least 60, at least 70, at least 80, at least 90, at least 100, at least 200, at least 300, at least 400, at least 500, at least 600, at least 700, at least 800, at least 900, at least 1000, at least 1500, at least 2000, at least 2500, at least 3000, at least 3500, at least 4000, at least 4500, at least 5000, at least 5500, at least 6000, at least 6500, at least 7000, at least 7500, at least 8000, at least 8500, at least 9000, at least 9500 or at least 10000.

[0408] In some embodiments, Z represents a number that is about 1, about 2, about 3, about 4, about 5, about 6, about 7, about 8, about 9, about 10, about 20, about 30, about 40, about 50, about 60, about 70, about 80, about 90, about 100, about 200, about 300, about 400, about 500, about 600, about 700, about 800, about 900, about 1000, about 1500, about 2000, about 2500, about 3000, about 3500, about 4000, about 4500, about 5000, about 5500, about 6000, about 6500, about 7000, about 7500, about 8000, about 8500, about 9000, about 9500 or about 10000.

[0409] In some embodiments, random polynucleotide query sequences are recovered from a sorted cell population and analyzed for enriched sequences. In some embodiments, the random sequences recovered from a sorted cell population is 3, 4, 5, 6, 7, 8, 9, 10, 11, 12, 13, 14, 15, 16, 17, 18, 19, 20, 21, 22, 23, 24, 25, 26, 27, 28, 29, 30, 31, 32, 33, 34, 35, 36, 37, 38, 39, 40, 41, 42, 43, 44, 45, 46, 47, 48, 49, 50, 51, 52, 54, 55, 56, 57, 58, 59, 60, 61, 62, 63, 64, 65, 66, 67, 68, 69, 70, 81, 82, 83, 84, 85, 86, 87, 88, 89, 90, 91, 92, 93, 94, 95, 96, 97, 98, 99, or 100 nucleic acid residues in length.

[0410] In some embodiments, X-mer random polynucleotide query sequences (i.e., random polynucleotide query sequences of X number of nucleic acid residues) are recovered from a high expression population and a low expression population. In some embodiments, X-mer random polynucleotide sequences are from a high expression population and a population with no expression.

[0411] In some embodiments, 4-mer to 100-mer, 4-mer to 90-mer, 4-mer to 80-mer, 4-mer to 70-mer, 4-mer to 60-mer, 4-mer to 50-mer, 4-mer to 40-mer, 4-mer to 30-mer, 4-mer to 20-mer, 4-mer to 19-mer, 4-mer to 18-mer, 4-mer to 17-mer, 4-mer to 16-mer, 4-mer to 15-mer, 4-mer to 14-mer, 4-mer to 13-mer, 4-mer to 12-mer, 4-mer to 11-mer, 4-mer to 10-mer, 4-mer to 9-mer, 4-mer to 8-mer, 4-mer to 7-mer, 5-mer to 100-mer, 5-mer to 90-mer, 5-mer to 80-mer, 5-mer to 70-mer, 5-mer to 60-mer, 5-mer to 50-mer, 5-mer to 40-mer, 5-mer to 30-mer, 5-mer to 20-mer, 5-mer to 19-mer, 5-mer to 18-mer, 5-mer to 17-mer, 5-mer to 16-mer, 5-mer to 15-mer, 5-mer to 14-mer, 5-mer to 13-mer, 5-mer to 12-mer, 5-mer to 11-mer, 5-mer to 10-mer, 5-mer to 9-mer, 5-mer to 8-mer, 5-mer to 7-mer, 6-mer to 100-mer, 6-mer to 90-mer, 6-mer to 80-mer, 6-mer to 70-mer, 6-mer to 60-mer, 6-mer to 50-mer, 6-mer to 40-mer, 6-mer to 30-mer, 6-mer to 20-mer, 6-mer to 19-mer, 6-mer to 18-mer, 6-mer to 17-mer, 6-mer to 16-mer, 6-mer to 15-mer, 6-mer to 14-mer, 6-mer to 13-mer, 6-mer to 12-mer, 6-mer to 11-mer, 6-mer to 10-mer, 6-mer to 9-mer, 6-mer to 8-mer, 6-mer to 7-mer, 7-mer to 100-mer, 7-mer to 90-mer, 7-mer to 80-mer, 7-mer to 70-mer, 7-mer to 60-mer, 7-mer to 50-mer, 7-mer to 40-mer, 7-mer to 30-mer, 7-mer to 20-mer, 7-mer to 19-mer, 7-mer to 18-mer, 7-mer to 17-mer, 7-mer to 16-mer, 7-mer to 15-mer, 7-mer to 14-mer, 7-mer to 13-mer, 7-mer to 12-mer, 7-mer to 11-mer, 7-mer to 10-mer, 7-mer to 9-mer, or 7-mer to 8-mer random polynucleotide query sequences (i.e., random polynucleotide query sequences of X number of nucleic acid residues) are recovered from a high expression population and a low expression population. In some embodiments, 4-mer to 100-mer, 4-mer to 90-mer, 4-mer to 80-mer, 4-mer to 70-mer, 4-mer to 60-mer, 4-mer to 50-mer, 4-mer to 40-mer, 4-mer to 30-mer, 4-mer to 20-mer, 4-mer to 19-mer, 4-mer to 18-mer, 4-mer to 17-mer, 4-mer to 16-mer, 4-mer to 15-mer, 4-mer to 14-mer, 4-mer to 13-mer, 4-mer to 12-mer, 4-mer to 11-mer, 4-mer to 10-mer, 4-mer to 9-mer, 4-mer to 8-mer, 4-mer to 7-mer, 5-mer to 100-mer, 5-mer to 90-mer, 5-mer to 80-mer, 5-mer to 70-mer, 5-mer to 60-mer, 5-mer to 50-mer, 5-mer to 40-mer, 5-mer to 30-mer, 5-mer to 20-mer, 5-mer to 19-mer, 5-mer to 18-mer, 5-mer to 17-mer, 5-mer to 16-mer, 5-mer to 15-mer, 5-mer to 14-mer, 5-mer to 13-mer, 5-mer to 12-mer, 5-mer to 11-mer, 5-mer to 10-mer, 5-mer to 9-mer, 5-mer to 8-mer, 5-mer to 7-mer, 6-mer to 100-mer, 6-mer to 90-mer, 6-mer to 80-mer, 6-mer to 70-mer, 6-mer to 60-mer, 6-mer to 50-mer, 6-mer to 40-mer, 6-mer to 30-mer, 6-mer to 20-mer, 6-mer to 19-mer, 6-mer to 18-mer, 6-mer to 17-mer, 6-mer to 16-mer, 6-mer to 15-mer, 6-mer to 14-mer, 6-mer to 13-mer, 6-mer to 12-mer, 6-mer to 11-mer, 6-mer to 10-mer, 6-mer to 9-mer, 6-mer to 8-mer, 6-mer to 7-mer, 7-mer to 100-mer, 7-mer to 90-mer, 7-mer to 80-mer, 7-mer to 70-mer, 7-mer to 60-mer, 7-mer to 50-mer, 7-mer to 40-mer, 7-mer to 30-mer, 7-mer to 20-mer, 7-mer to 19-mer, 7-mer to 18-mer, 7-mer to 17-mer, 7-mer to 16-mer, 7-mer to 15-mer, 7-mer to 14-mer, 7-mer to 13-mer, 7-mer to 12-mer, 7-mer to 11-mer, 7-mer to 10-mer, 7-mer to 9-mer, or 7-mer to 8-mer random polynucleotide sequences are from a high expression population and a population with no expression.

[0412] In some embodiments, X-mer random polynucleotide sequences (XN) are recovered from a population and are extended by appending random nucleotides (r) of the vector (e.g., DNA vector) sequence to the 5′ and/or 3′ ends to generate the polynucleotide query sequences (e.g., 5′-r-XN-r-3′). In some embodiments, the appended random nucleotides of the vector sequence is 1, 2, 3, 4, or 5 nucleic acid residues in length. In some embodiments, the appended random nucleotides of each end is 1 nucleic acid residues in length (e.g., 5′-1r-XN-1r-3′). In some embodiments, the appended random nucleotides is 2 nucleic acid residues in length (e.g., 5′-2r-XN-2r-3′).

[0413] As an illustration, in some embodiments, 10-mer random polynucleotide sequences are recovered from a high expression population and a low expression population. In some embodiments, 10-mer random polynucleotide sequences are from a high expression population and a population with no expression.

[0414] In some embodiments, 10-mer random polynucleotide sequences (1ON) are recovered from a population and are extended by appending random nucleotides (r) of the vector (e.g., DNA vector) sequence to the 5′ and/or 3′ ends to generate the polynucleotide query sequence (e.g., 5′-r-10N-r-3′). In some embodiments, the appended random nucleotides of the vector sequence is 1, 2, 3, 4, or 5 nucleic acid residues in length. In some embodiments, the appended random nucleotides of each end is 1 nucleic acid residues in length (e.g., 5′-1r-10N-1r-3′). In some embodiments, the appended random nucleotides is 2 nucleic acid residues in length (e.g., 5′-2r-10N-2r-3′).

[0415] In some embodiments, a series of overlapping polynucleotide fragment sequences (e.g., overlapping subsequences) are generated from the polynucleotide query sequence. In some embodiments, X-Y+1 number of overlapping polynucleotide fragment sequences within the polynucleotide query sequence, wherein X is the length of the polynucleotide query sequence, wherein each polynucleotide fragment sequence consists of Y nucleic acid residues in length, wherein the first position of each polynucleotide fragment sequence is n and the last position of the same polynucleotide fragment sequence is Y+n−1, and wherein n represents each positive integer between 1 and X−Y+1.

[0416] In some embodiments, the overlapping polynucleotide fragment sequence is greater than or equal to 2 nucleic acid residues in length. In some embodiments, the overlapping polynucleotide fragment sequence is 2-299 nucleic acid residues in length. In some embodiments, the overlapping polynucleotide fragment sequence is 2-200 nucleic acid residues in length. In some embodiments, the overlapping polynucleotide fragment sequence is 2-100 nucleic acid residues in length. In some embodiments, the overlapping polynucleotide fragment sequence is 2, 3, 4, 5, 6, 7, 8, 9, 10, 11, 12, 13, 14, 15, 16, 17, 18, 19, 20, 21, 22, 23, 24, 25, 26, 27, 28, 29, 30, 31, 32, 33, 34, 35, 36, 37, 38, 39, 40, 41, 42, 43, 44, 45, 46, 47, 48, 49, 50, 51, 52, 54, 55, 56, 57, 58, 59, 60, 61, 62, 63, 64, 65, 66, 67, 68, 69, 70, 81, 82, 83, 84, 85, 86, 87, 88, 89, 90, 91, 92, 93, 94, 95, 96, 97, 98, 99, or 100 nucleic acid residues in length. In some embodiments, overlapping polynucleotide fragment sequence is 5 nucleic acid residues in length. In some embodiments, overlapping polynucleotide fragment sequence is 6 nucleic acid residues in length. In some embodiments, overlapping polynucleotide fragment sequence is 7 nucleic acid residues in length. In some embodiments, overlapping polynucleotide fragment sequence is 8 nucleic acid residues in length. In some embodiments, overlapping polynucleotide fragment sequence is 9 nucleic acid residues in length. In some embodiments, overlapping polynucleotide fragment sequence is 10 nucleic acid residues in length. In some embodiments, overlapping polynucleotide fragment sequence is 11 nucleic acid residues in length. In some embodiments, overlapping polynucleotide fragment sequence is 12 nucleic acid residues in length.

### 8.2.2.1.c. Determining an Enrichment Score

[0417] In some embodiments, the enrichment score for a polynucleotide fragment sequence is determined by: i) generating a expression plasmid library, wherein each expression plasmid of the library comprises a different polynucleotide fragment sequence and a reporter gene as described above, ii) contacting a population of cells with the expression plasmid library; iii) quantifying the expression level of the reporter gene corresponding to each expression plasmid of the expression plasmid library; iv) dividing the total population of cells into a first population and a second population based on the protein expression levels of iii); v) determining an enrichment score for the polynucleotide fragment sequence.

[0418] An enrichment score can be calculated using any suitable statistical analysis method known in the art or described herein. Exemplary methods for calculating an enrichment score include but are not limited to a Z-test, odd ratio, T-test, or Fisher's exact test. Exemplary methods for calculating an enrichment score are described in Wang, Z. et al. (Cell 119, 831 (2004)), each of which are incorporated herein by reference in their entirety.

[0419] In some embodiments, enrichment score of each overlapping polynucleotide fragment sequence within two populations are calculated using Z-test, thereby producing a Z-score. In some embodiments, the enrichment score (e.g., Z-score) of each overlapping polynucleotide fragment sequence is calculated using a Z-test. In some embodiments, the Z-test formula used to calculate a Z-score is shown in the following system of equations:

$$\begin{matrix}Z - Score = \frac{{f}_{1} - {f}_{2}}{\sqrt{( \frac{1}{{N}_{1}} + \frac{1}{{N}_{2}} ) P ( 1 - P )}} \\ P = \frac{{N}_{1} {f}_{1} - {N}_{2} {f}_{2}}{{N}_{1} + {N}_{2}}\end{matrix}$$

wherein f₁ is the frequency of a certain sequence in population 1, f₂ is the frequency of the same sequence in population 2, N₁ is the size of population 1, and N₂ is the size of population 2.

[0420] In some embodiments, the overlapping polynucleotide fragment sequence is a hexamer (6 nucleic acid residues in length or 6-mer). In some embodiments, f₁ is the frequency of each hexamer sequence in population 1, f₂ is the frequency of the same hexamer sequence in population 2, N₁ is the size of population 1 (i.e., the total number of hexamers in population 1), and N₂ is the size of population 2 (i.e., the total number of hexamers in population 2).

[0421] In some embodiments, the overlapping polynucleotide fragment sequence is a pentamer (5 nucleic acid residues in length or 5-mer). In some embodiments, f₁ is the frequency of each pentamer sequence in population 1, f₂ is the frequency of the same pentamer sequence in population 2, N₁ is the size of population 1 (i.e., the total number of pentamers in population 1), and N₂ is the size of population 2 (i.e., the total number of pentamers in population 2).

[0422] In some embodiments, the overlapping polynucleotide fragment sequence is a pentamer (5 nucleic acid residues in length or 5-mer). In some embodiments, f₁ is the frequency of each pentamer sequence in population 1, f₂ is the frequency of the same pentamer sequence in population 2, N₁ is the size of population 1, and N₂ is the size of population 2.

[0423] In some embodiments, population 1 is a high expression population described herein. In some embodiments, population 1 is a medium expression population described herein. In some embodiments, population 1 is a low expression population described herein. In some embodiments, population 1 is a no expression population described herein.

[0424] In some embodiments, population 2 is a high expression population described herein. In some embodiments, population 2 is a medium expression population described herein. In some embodiments, population 2 is a low expression population described herein. In some embodiments, population 2 is a no expression population described herein.

[0425] In some embodiments, population 1 is a high expression population described herein, and population 2 is a medium expression population described herein. In some embodiments, population 1 is a high expression population described herein, and population 2 is a low expression population described herein. In some embodiments, population 1 is a high expression population described herein, and population 2 is a no expression population described herein.

[0426] In some embodiments, population 1 is a medium expression population described herein, and population 2 is a low expression population described herein. In some embodiments, population 1 is a medium expression population described herein, and population 2 is a no expression population described herein. In some embodiments, population 1 is a medium expression population described herein, and population 2 is a high expression population described herein.

[0427] In some embodiments, population 1 is a low expression population described herein, and population 2 is a no expression population described herein. In some embodiments, population 1 is a low expression population described herein, and population 2 is a medium expression population described herein. In some embodiments, population 1 is a low expression population described herein, and population 2 is a high expression population described herein.

[0428] In some embodiments, population 1 is a no expression population described herein, and population 2 is a low expression population described herein. In some embodiments, population 1 is a no expression population described herein, and population 2 is a medium expression population described herein. In some embodiments, population 1 is a no expression population described herein, and population 2 is a high expression population described herein.

[0429] Exemplary overlapping polynucleotide fragment sequences (e.g., pentamers) and enrichment scores (e.g., Z-scores) are shown in Table 1.

[0430] As one of skill in the art will appreciate, rank ordering of overlapping polynucleotide fragments described herein provides a method whereby functional synthetic IRES-like sequences can be designed or generated. Without wishing to be bound by theory, it is believed that the inclusion of a high frequency of top ranked polynucleotide fragment motifs within a synthetic IRES-like sequence will result in a higher probability of IRES-like function. Top ranked polynucleotide fragment motifs within the IRES-like sequence include but are not limited to SEQ ID NOs: 1, 2, 3, 4, 5, 6, 8, 9, 10, 11, 12, 13, 14, 15, 17, 22, 23, 25, 58, 62.

[0431] Conversely, without wishing to be bound by theory, it is believed that the inclusion of a high frequency of the bottom ranked polynucleotide fragment motifs within a synthetic IRES-like sequence will result in a lower probability of IRES-like function.

### 8.2.2.1.d. Determining a Numerical Score of a Polynucleotide Sequence and Identifying an IRES-Like Sequence

[0432] In some embodiments, a numerical score for a polynucleotide query sequence is determined by summing the enrichment scores (e.g., Z-scores) for each overlapping polynucleotide fragment sequence. In some embodiments, a numerical score for a polynucleotide query sequence is determined by averaging the enrichment scores (e.g., Z-scores) for each overlapping polynucleotide fragment sequence.

[0433] In some embodiments, the numerical scores are normally distributed according to the following system of equations z=(X_{numerical score}−μ)/σ=2.06; and thus X=z*σ+μ. In some embodiments, a polynucleotide query sequence having a σ greater or equal to z are identified as an IRES-like sequence.

[0434] In some embodiments, the polynucleotide query sequence having a σ less than or equal to X are identified as a non-IRES sequence.

[0435] In some embodiments, a polynucleotide query sequence having a numerical score greater or equal to 0 are identified as IRES-like sequences. In some embodiments, a polynucleotide query sequence having a numerical score greater than or equal to 5, 10, 15, 20, 25, 30, 35, 40, 45, 50, 55, 60, 65, 70, 75, 80, 85, 90, 95, 100, 200, 300, 400, 500, 600, 700, 800, 900, 1000, 1100, 1200, 1300, 1400, 1500, 1600, 1700, 1800, 1900, 2000, 2100, 2200, 2300 or 2500 are identified as IRES-like sequences.

[0436] In some embodiments, a polynucleotide query sequence having a numerical score less than 0 is identified as a non-IRES sequence. In some embodiments, a polynucleotide query sequence having a numerical score smaller than 5, 10, 15, 20, 25, 30, 35, 40, 45, 50, 55, 60, 65, 70, 75, 80, 85, 90, 95, 100, 200, 300, 400, 500, 600, 700, 800, 900, 1000, 1100, 1200, 1300, 1400, 1500, 1600, 1700, 1800, 1900, 2000, 2100, 2200, 2300 or 2500 are identified as IRES-like sequences.

[0437] In some embodiments, the polynucleotide query sequences having rank ordered numerical scores in the top 5% of all equivalent length polynucleotide query sequences are considered as IRES-like sequences. In some embodiments, the polynucleotide query sequences having rank ordered numerical scores in the top 10% of all equivalent length polynucleotide query sequences are considered as IRES-like sequences. In some embodiments, the polynucleotide query sequences having rank ordered numerical scores in the top 15% of all equivalent length polynucleotide query sequences are considered as IRES-like sequences. In some embodiments, the polynucleotide query sequences having rank ordered numerical scores in the top 20% of all equivalent length polynucleotide query sequences are considered as IRES-like sequences. In some embodiments, the polynucleotide query sequences having rank ordered numerical scores in the top 25% of all equivalent length polynucleotide query sequences are considered as IRES-like sequences.

[0438] In some embodiments, the polynucleotide query sequences having rank ordered numerical scores in the bottom 5% of all equivalent length polynucleotide query sequences are considered as non-IRES sequences. In some embodiments, the polynucleotide query sequences having rank ordered numerical scores in the bottom 10% of all equivalent length polynucleotide query sequences are considered as non-IRES sequences. In some embodiments, the polynucleotide query sequences having rank ordered numerical scores in the bottom 15% of all equivalent length polynucleotide query sequences are considered as non-IRES sequences. In some embodiments, the polynucleotide query sequences having rank ordered numerical scores in the bottom 20% of all equivalent length polynucleotide query sequences are considered as non-IRES sequences. In some embodiments, the polynucleotide query sequences having rank ordered numerical scores in the bottom 25% of all equivalent length polynucleotide query sequences are considered as non-IRES sequences.

[0439] In some embodiments, the polynucleotide query sequences having rank ordered numerical scores in the top 10% of all equivalent length polynucleotide query sequences are considered as IRES-like sequences. In some embodiments, the polynucleotide query sequences having rank ordered numerical scores in the top 5% of all equivalent length polynucleotide query sequences are considered as IRES-like sequences. In some embodiments, the polynucleotide query sequences having rank ordered numerical scores in the top 2% of all equivalent length polynucleotide query sequences are considered as IRES-like sequences. Exemplary IRES-like Sequences and Numerical Scores are shown in Tables 2-96, 110 and 112. Accordingly, exemplary IRES-like sequences of the disclosure include but are not limited to those listed in Tables 2-96, 110 and 112. In some embodiments, the IRES-like sequence comprises a nucleic acid sequence that is at least 90%, at least 91%, at least 92%, at least 93%, at least 94%, at least 95%, at least 96%, at least 97%, at least 98%, at least 99% or at least 100% identical to the nucleic acid sequence of the IRES-like sequences of Tables 2-96, 110 and 112 or a functional portion thereof.

### 8.2.2.2. Methods of Optimizing IRES-Like Sequences

[0440] Genetic algorithms are search algorithms that use random perturbations of a list of random subsets to generate new subjects (see Schmitt, Lothar M (2001), Theory of Genetic Algorithms, Theoretical Computer Science (259), pp. 1-61). Genetic algorithms represent one branch of the field of study called evolutionary computation, in that they imitate the biological processes of reproduction and natural selection to solve for the ‘fittest’ solutions (Goldberg, D. E. (1989), Genetic Algorithms in Search, Optimization, and Machine Learning. Reading: Addison-Wesley). Genetic algorithms are an iterative optimization procedure that repeatedly apply operators (such as selection, hybrid, and mutation) to a group of solutions until some criterion of convergence has been satisfied. Each iterative step where a new population is obtained is called a generation.

[0441] In some embodiments, a genetic algorithm is used to generate top sequences pool (FIG. 3, (130) and FIG. 4, (230)).

[0442] In some embodiments, a genetic algorithm procedure comprising the following steps as shown in FIG. 3: a) randomly generate an initial population with defined length as the current parent population, wherein the initial population has size=N (100); b) evaluate the objective function for each individual sequence in the initial population using an evaluation function (also known as a fitness function; a fitter sequence has higher score) (e.g., Z-score) (110); c) select top sequences to form a top sequence pool (size=D) (130); d) choose some of the sequences in the top sequence pool with a selection operator (the fitter a sequence is, the more likely is to be selected) (120); and e) generate an offspring population by a hybrid operator (121) and/or a mutation operator (122); and steps b)-e) cycle repeats.

[0443] In some embodiments, a genetic algorithm procedure comprising the following steps as shown in FIG. 4: a) randomly generate an initial population with defined length as the current parent population, wherein the initial population has size=N (200); b) evaluate the objective function for each individual sequence in the initial population using an evaluation function (also known as a fitness function; a fitter sequence has higher score) (e.g., Z-score) (210); c) select top sequences to form a top sequence pool (size=D) (230); d) choose some of the sequences in the top sequence pool with a selection operator (the fitter a sequence is, the more likely is to be selected) (220); and e) generate an offspring population by a crossover operator (221) and/or a mutation operator (222); and steps b)-e) cycle repeats.

[0444] In some embodiments, the initial population has a defined length of 5, 6, 7, 8, 9, 10, 11, 12, 13, 14, 15, 16, 17, 18, 19, 20, 21, 22, 23, 24, 25, 26, 27, 28, 29, 30, 31, 32, 33, 34, 35, 36, 37, 38, 39, 40, 41, 42, 43, 44, 45, 46, 47, 48, 49, 50, 51, 52, 53, 54, 55, 56, 57, 58, 59, 60, 61, 62, 63, 64, 65, 66, 67, 68, 69, 70, 71, 72, 73, 74, 75, 76, 77, 78, 79, 80, 81, 82, 83, 84, 85, 86, 87, 88, 89, 90, 91, 92, 93, 94, 95, 96, 97, 98, 99, or 100 nucleic acid residues. In some embodiments, the initial population has a defined length in between 5-12 nucleic acid residues. In some embodiments, the initial population has a defined length in between 12-20 nucleic acid residues. In some embodiments, the initial population has a defined length in between 20-100 nucleic acid residues. In some embodiments, the initial population has a defined length in between 100-200 nucleic acid residues. In some embodiments, the initial population has a defined length in between 200-300 nucleic acid residues. In some embodiments, the initial population has a defined length in between 300-400 nucleic acid residues. In some embodiments, the initial population has a defined length in between 400-500 nucleic acid residues. In some embodiments, the initial population has a defined length in between 500-600 nucleic acid residues. In some embodiments, the initial population has a defined length in between 600-700 nucleic acid residues. In some embodiments, the initial population has a defined length in between 500-600 nucleic acid residues. In some embodiments, the initial population has a defined length in between 600-700 nucleic acid residues. In some embodiments, the initial population has a defined length in between 700-800 nucleic acid residues. In some embodiments, the initial population has a defined length in between 800-900 nucleic acid residues. In some embodiments, the initial population has a defined length in between 900-1000 nucleic acid residues.

[0445] In some embodiments, the genetic algorithms are iterated until the top sequence pool stabilizes and does not change for many generations. In some embodiments, the genetic algorithms are iterated until the top sequence pool stabilizes and does not change for 10, 15, 20, 25, 30, 35, 40, 45, 50, 55, 60, 65, 70, 75, 80, 85, 90, 95, or 100 generations.

[0446] In some embodiments, the genetic algorithms are iterated until the top sequence pool stabilizes and does not change for 20 generations.

[0447] In some embodiments, selection, hybrid, and mutation process continues until the number of offspring is the same as the initial population, so that the offspring generation is composed entirely of new offspring and the parent generation is completely replaced.

[0448] In some embodiments, selection, hybrid, and mutation process allow highly-scored sequences of the parent generation survive into the offspring generation.

[0449] In some embodiments, a genetic algorithm is used to select top-ranked sequences.

[0450] In some embodiments, a genetic algorithm is used to select bottom-ranked sequence.

[0451] In some embodiments, hybrids and mutations are applied to the sequence pool of the current generation to create the next generation. In some embodiments, random addition or deletion are applied to the sequence pool of the current generation to create the next generation. A hybrid step combines features from a pair of subsets to form a new subset. In one preferred embodiment, hybrid is an operator that is the same as crossover.

[0452] In one preferred embodiment, race search that uses a t-test to determine the probability of a subset being better than the current best subset by at least a small user-specified threshold is suitable.

[0453] In some embodiments, hybrids and mutations are applied to the sequence pool of the current generation to create the next generation. In some embodiments, random addition or deletion are applied to the sequence pool of the current generation to create the next generation. A hybrid step combines features from a pair of subsets to form a new subset. In one preferred embodiment, hybrid is an operator that is the same as crossover.

[0454] In one preferred embodiment, race search that uses a t-test to determine the probability of a subset being better than the current best subset by at least a small user-specified threshold is suitable.

### 8.3. Therapeutic Product

[0455] In some embodiments, the polynucleotide of the present disclosure encodes a therapeutic product.

[0456] In some embodiments, the therapeutic product is a polypeptide, a protein, an enzyme, an antibody, or a combination thereof. In some embodiments, the therapeutic product comprises one or more polypeptides, proteins, enzymes, antibodies, or a combination thereof.

[0457] In some embodiments, the therapeutic product is a protein or enzyme. In some embodiments, the protein or enzyme is associated with a genetic disease (e.g., a disease in which a genetic alteration (e.g., mutation) and/or protein dysregulation plays a role in the initiation, development, and/or manifestation of the disease).

[0458] In some embodiments, the therapeutic product is a polypeptide or protein. In some embodiments, the polypeptide or protein resembles a weakened or non-viable form of a disease-causing agent (e.g., an infectious agent such as pathogen), which can be selected from a microorganism, such as a bacterium, virus, fungus, parasite, or one or more components of such microorganism, such as toxins, proteins (e.g., surface proteins), and/or cell walls. In some embodiments, the therapeutic product is an antigen or agent which can stimulate the body's immune system to recognize the antigen or agent, generate antibodies against the antigen or agent, destroy the antigen or agent, and/or develop an immunological memory of the antigen or agent. In some embodiments, the therapeutic product is an antigen or agent which can induce and/or strengthen vaccine-induced memory and/or enable the immune system to respond rapidly and effectively to the antigen or agent in later encounters.

[0459] In some embodiments, the therapeutic product is derived from an infectious agent or a part, component, and/or product thereof (e.g., cell wall, genomic sequence, membrane, capsid, protein, lipid, glycan, toxin). In some embodiments, the infectious agent is selected from a virus, a bacterium, a fungus, a protozoan, and a helminth. In some embodiments, the infectious agent is selected a virus and a bacterium.

[0460] In some embodiments, the infectious agent is a virus selected from the group consisting of adenovirus; Herpes simplex, type 1; Herpes simplex, type 2; encephalitis virus, papillomavirus; Varicella-zoster virus; Epstein-Barr virus; human cytomegalovirus; human herpes virus, type 8; BK virus; JC virus; Smallpox; polio virus; human bocavirus; Parvovirus B19; human astrovirus; Norwalk virus; coxsackievirus; hepatitis A virus; hepatitis B virus; hepatitis C virus; hepatitis D virus; hepatitis E virus; rhinovirus; severe acute respiratory syndrome (SARS) virus; Yellow Fever virus; Dengue virus; West Nile virus; Rubella virus; Human Immunodeficiency virus (HIV); influenza virus; Guanarito virus; Junin virus; Lassa virus; Machupo virus; Sabia virus; Crimean-Congo hemorrhagic fever virus; Ebola virus; Marburg virus; measles virus; mumps virus; parainfluenza virus; respiratory syncytial virus (RSV); human metapneumovirus; Hendra virus; Nipah virus; rabies virus; Rotavirus; Orbivirus; Coltivirus; Banna virus; human Enterovirus; Hanta virus; West Nile virus; corona virus, SARS-associated coronavirus (SARS-CoV), SARS-CoV-2 virus (COVID-19 associated); Middle East respiratory syndrome corona virus; Japanese encephalitis virus; vesicular exanthernavirus; and eastern equine encephalitis.

[0461] In some embodiments, the infectious agent is a bacterium selected from tuberculosis (Mycobacterium tuberculosis), clindamycin-resistant Clostridium difficile, fluoroquinolon-resistant Clostridium difficile, methicillin-resistant Staphylococcus aureus (MRSA), multidrug-resistant Enterococcus faecalis, multidrug-resistant Enterococcus faecium, multidrug-resistance Pseudomonas aeruginosa, multidrug-resistant Acinetobacter baumannii, and vancomycin-resistant Staphylococcus aureus (VRSA).

[0462] In some embodiments, the infectious agent is associated with humans, non-human primates, or other animals, such as birds, pigs, horses, dogs, cats, rabbits, mice, rats, cows, sheep, goats, and deer.

[0463] In some embodiments, the therapeutic product is an antibody. In some embodiments, the antibody includes, but is not limited to, monoclonal antibodies, polyclonal antibodies, recombinantly produced antibodies, human antibodies, humanized antibodies, chimeric antibodies, synthetic antibodies, tetrameric antibodies comprising two heavy chain and two light chain molecules, antibody light chain monomers, antibody heavy chain monomers, antibody light chain dimers, antibody heavy chain, antibody heavy chain dimers, antibody light chain-heavy chain pairs, intrabodies, heteroconjugate antibodies, monovalent antibodies, antigen-binding fragments of full-length antibodies, and fusion proteins of the above. The antigen-binding fragments include, but are not limited to, single-domain antibodies (variable domain of heavy chain antibodies (VHHs) or nanobodies), Fabs, Fab's, F(ab′)₂s, Fds, Fvs, scFvs (single-chain variable fragments).

### 8.3.1. Methods of Therapeutic Product Production

[0464] The disclosure further provides a method of producing a protein in a cell, which comprises contacting a cell with the RNA polynucleotides described herein (e.g., circular RNA molecule), a DNA vector encoding or suitable for synthesizing the RNA polynucleotide, whereby the expression protein-coding nucleic acid sequence is translated and the protein is produced in the cell.

[0465] In some embodiments, a method of producing a protein in a cell comprises contacting a cell with an RNA polynucleotide (e.g., circular RNA) sequence described herein, or a vector comprising the RNA polynucleotide (e.g., circular RNA) sequence, under conditions whereby the protein-coding nucleic acid sequence is translated and the protein is produced in the cell. Also provided is a protein produced by the disclosed methods.

[0466] In some embodiments, production of the protein is tissue-specific. For example, the protein may be selectively produced in one or more of the following tissues: muscle, liver, kidney, brain, lung, skin, pancreas, blood, or heart.

[0467] In some embodiments, the protein is expressed recursively in the cell.

[0468] In some embodiments, the protein is produced in the cell for at least about 10%, at least about 20%, or at least about 30% longer than if the protein-coding nucleic acid sequence is provided to the cell using a viral vector encoding a linear RNA or as a linear RNA.

[0469] In some embodiments, the protein is produced in the cell at a level that is at least about 10%, at least about 20%, or at least about 30% higher than if the protein-coding nucleic acid sequence is provided to the cell using a viral vector or as a linear RNA.

[0470] In some embodiments, the RNA polynucleotides (e.g., circular RNA) described herein (including components thereof, such as the IRES-like sequences) facilitate cap-independent translation activity from the circRNA. Canonical translation via a cap-independent mechanism may be reduced in some human diseases. Accordingly, the use of circRNAs to express proteins may be particularly helpful for treating such diseases. In some embodiments, use of the circRNAs described herein facilitates cap-independent translation activity from the circRNA under conditions wherein cap-dependent translation is reduced or turned-off in a cell.

[0471] As discussed above, translation of the protein-coding nucleic acid sequence may occur in an infinite loop (i.e., recursively) when the IRES is in-frame with the protein-coding nucleic acid sequence and the protein-coding sequence lacks a stop codon. Thus, in some embodiments, the method of producing a protein in a cell produces a concatenated protein.

[0472] Any prokaryotic or eukaryotic host cell described herein may be contacted with the recombinant circRNA molecule or a vector comprising the circRNA molecule. The host cell may be a mammalian cell, such as a human cell. In some embodiments, the cell is in vivo. In some embodiments, the cell is in vitro. In some embodiments, the cell is ex vivo. In some embodiments, the cell is in a mammal, such as a human.

[0473] In some embodiments, regardless of cell type chosen, 5′ cap-dependent translation is impaired in the cell (e g., decreased, reduced, inhibited, or completely obliterated). In some embodiments, there is no substantial 5′ cap-dependent translation in the cell.

[0474] The recombinant circular RNA molecule, a DNA molecule encoding same, or vectors comprising same, may be introduced into a cell by any method, including, for example, by transfection, transformation, or transduction. The terms “transfection, “transformation,” and “transduction” are used interchangeably herein and refer to the introduction of one or more exogenous polynucleotides into a host cell by using physical or chemical methods. Many transfection techniques are known in the art and include, for example, calcium phosphate DNA co-precipitation (see, e.g., Murray E. J. (ed.), Methods in Molecular Biology, Vol. 7, Gene Transfer and Expression Protocols, Humana Press (1991)); DEAE-dextran; electroporation; cationic liposome-mediated transfection; tungsten particle-facilitated microparticle bombardment (Johnston, Nature, 346: 776-777 (1990)); strontium phosphate DNA co-precipitation (Brash et al., Mol. Cell. Biol., 7: 2031-2034 (1987); and magnetic nanoparticle-based gene delivery (Dobson, J., Gene Ther, 13 (4): 283-7 (2006)).

### 8.3.2. Post-Translational Modification of Therapeutic Product

[0475] In some embodiments, the therapeutic product (for example, a protein) is post-translationally modified. In some embodiments, the post-translational modification is specific to the cell type, the tissue type, or the organ, where the therapeutic product is produced or delivered.

[0476] In some embodiments, the post-translational modification is acetylation, SUMOylation, glycosylation, tyrosine sulfation, phosphorylation, ADP-ribosylation, prenylation, myristoylation, palmitoylation, ubiquitination, sentrinization, and/or a ubiquitination-like protein modification.

[0477] In some embodiments, the therapeutic product is post-translationally modified in vitro, ex vivo, or in vivo.

[0478] In some embodiments, the therapeutic product is post-translationally modified upon expression in a cell (e.g., a primary cell, a cell line derived from a primary cell, an immortalized cell). In some embodiments, the cell is an immortalized cell (e.g., a human immortalized cell).

[0479] In some embodiments, the therapeutic product is post-translationally modified in a living organism (e.g., a bacterium, an animal).

[0480] In some embodiments, the therapeutic product is post-translationally modified in an animal (e.g., an animal described herein). In some embodiments, the therapeutic product is post-translationally modified in a human.

[0481] In some embodiments, the post-translation modification can be detected by techniques known in the art, including by gel electrophoresis, Western blotting, Eastern blotting, immunoprecipitation, mass spectrometry, chromatography, and flow cytometry. Analysis of modified proteins is typically performed by electrophoresis and autoradiography, with specificity enhanced by immunoprecipitation of proteins of interest prior to electrophoresis.

[0482] In some embodiments, detection of the post-translation modification may include in vivo labeling of cellular substrate pools with radioactive substrate or substrate precursor molecules, which result in incorporation of radiolabeled moieties, including, but not limited to, phosphate, fatty acyl (e.g., myristoyl or palmitoyl), sentrin, methyl, acetyl, hydroxyl, iodine, flavin, ubiquitin or ADP-ribosyls, to the therapeutic product. In some embodiments, detection of the post-translation modification may include enzymatic incorporation of a labeled moiety into the therapeutic product in vitro to estimate the state of modification in vivo. In some embodiments, the labeled moiety includes but is not limited to, a radioactive isotope, a luminescent enzyme (e.g., horseradish peroxidase, HRP), or a fluorescent label.

[0483] In some embodiments, the post-translation modification can be detected by analyzing the alteration in electrophoretic mobility of a modified therapeutic product compared with an unmodified therapeutic product.

[0484] In some embodiments, the post-translation modification can be detected by thin-layer chromatography of radiolabeled fatty acids extracted from a therapeutic product.

[0485] In some embodiments, the post-translation modification can be detected by partitioning of a therapeutic product into detergent-rich or detergent layer by phase separation, and the effects of enzyme treatment of the therapeutic product on the partitioning between aqueous and detergent-rich environments.

### 8.4. RNA Polynucleotides

[0486] In some embodiments, provided herein is an RNA polynucleotide comprising an engineered translation initiation element (TI) comprising an IRES-like polynucleotide sequence.

[0487] In some embodiments, provided herein is an RNA polynucleotide comprising a construct of Formula I: 5′-(A1)₀₋₁-(L)ₙ-TI-(L)ₙ-Z1-(L)ₙ-(B1)₀₋₁-3′ (I).

[0488] In some embodiments, in Formula I, TI is an engineered translation initiation element comprising an IRES-like polynucleotide sequence; Z1 is an expression sequence encoding a therapeutic product; each L is independently a linker sequence; and n is a positive integer (e.g., an integer selected from 0 to 2).

[0489] In some embodiments, in Formula I: A1 and B1 are each independently a sequences capable of circularizing the RNA polynucleotide. In some embodiments, in Formula I: A1 and B1 are a pair of homologous sequences capable of spontaneous cleavage and circularization of the RNA polynucleotide.

[0490] In some embodiments, in Formula I: A1 and B1 each independently comprise a nucleotide derivative capable of joining the 5′ end and the 3′ end via a 3′ to 5′ phosphodiester linkage for circularization of the RNA polynucleotide.

[0491] In some embodiments, in Formula I: A1 and B1 each independently comprise a nucleotide triphosphate derivative capable of joining the 5′ end and the 3′ end via a 3′ to 5′ phosphodiester linkage for circularization of the RNA polynucleotide.

[0492] In some embodiments, provided herein is an RNA polynucleotide comprising a construct of Formula II: 5′-(A1)₀₋₁-(L)ₙ-Z1_{B}-(L)ₙ-TI-(L)ₙ-Z1_{A}-(L)ₙ-(B1)₀₋₁-3′ (11).

[0493] In some embodiments, in Formula II, TI is an engineered translation initiation element comprising an IRES-like polynucleotide sequence; Z1_{A} is a first portion of an expression sequence encoding a therapeutic product; Z1_{B} is a second portion of the expression sequence encoding a therapeutic product; each L is independently a linker sequence; and n is a positive integer (e.g., an integer selected from 0 to 2).

[0494] In some embodiments, in Formula II: A1 and B1 are each independently a sequences capable of circularizing the RNA polynucleotide. In some embodiments, in Formula I: A1 and B1 are a pair of homologous sequences capable of spontaneous cleavage and circularization of the RNA polynucleotide.

[0495] In some embodiments, in Formula II: A1 and B1 each independently comprise a nucleotide derivative capable of joining the 5′ end and the 3′ end via a 3′ to 5′ phosphodiester linkage for circularization of the RNA polynucleotide.

[0496] In some embodiments, in Formula II: A1 and B1 each independently comprise a nucleotide triphosphate derivative capable of joining the 5′ end and the 3′ end via a 3′ to 5′ phosphodiester linkage for circularization of the RNA polynucleotide.

[0497] In some embodiments, provided herein is an RNA polynucleotide comprising a construct of Formula III: 5′-(3′ intron fragment)-(E2)-(L)ₙ-TI-(L)ₙ-Z1-(L)ₙ-(E1)-(5′ intron fragment)-3′ (III).

[0498] In some embodiments, in Formula III, TI is an engineered translation initiation element comprising an IRES-like polynucleotide sequence; Z1 is an expression sequence encoding a therapeutic product; each L is independently a linker sequence; and n is a positive integer (e.g., an integer selected from 0 to 2).

[0499] In some embodiments, in Formula III, the 5′ intron fragment and the 3′ intron fragment are each a fragment of a group II intron, wherein the 5′ intron fragment is located on the 5′ side of the 3′ intron fragment in the group II intron.

[0500] In some embodiments, in Formula III, the E1 is a 5′ adjacent exon fragment of the group II intron, which is ≥0 nucleotides in length.

[0501] In some embodiments, in Formula III, the E2 is a 3′ adjacent exon fragment of the group II intron, which is 3 0 nucleotides in length.

[0502] In some embodiments, in Formula III, the E1 is a 5′ adjacent exon fragment of the group II intron, which is 3 0 nucleotides in length; the E2 is a 3′ adjacent exon fragment of the group II intron, which is ≥0 nucleotides in length.

[0503] In some embodiments, provided herein is an RNA polynucleotide comprising a construct of Formula IV: 5′-(3′ intron fragment)-(E2)-(L)ₙ-Z1_{B}-(L)ₙ-TI-(L)ₙ-Z1_{A-}-(L)ₙ-(E1)-(5′ intron fragment)-3′ (IV).

[0504] In some embodiments, in Formula IV, TI is an engineered translation initiation element comprising an IRES-like polynucleotide sequence; Z1_{A} is a first portion of an expression sequence encoding a therapeutic product; Z1_{B} is a second portion of the expression sequence encoding a therapeutic product; each L is independently a linker sequence; and n is a positive integer (e.g., an integer selected from 0 to 2).

[0505] In some embodiments, in Formula IV, the 5′ intron fragment and the 3′ intron fragment are each a fragment of a group II intron, wherein the 5′ intron fragment is located on the 5′ side of the 3′ intron fragment in the group II intron.

[0506] In some embodiments, in Formula IV, the E1 is a 5′ adjacent exon fragment of the group II intron, which is ≥0 nucleotides in length.

[0507] In some embodiments, in Formula IV, the E2 is a 3′ adjacent exon fragment of the group II intron, which is ≥0 nucleotides in length.

[0508] In some embodiments, in Formula IV, the E1 is a 5′ adjacent exon fragment of the group II intron, which is ≥0 nucleotides in length; the E2 is a 3′ adjacent exon fragment of the group II intron, which is ≥0 nucleotides in length.

[0509] In some embodiments, provided herein is an RNA polynucleotide comprising a construct of Formula V: 5′-TI-(L)ₙ-Z1-3′ (V).

[0510] In some embodiments, in Formula V, TI is an engineered translation initiation element comprising an IRES-like polynucleotide sequence; Z1 is an expression sequence encoding a therapeutic product; each L is independently a linker sequence; and n is a positive integer (e.g., an integer selected from 0 to 2).

[0511] In some embodiments, in Formula III or IV, the RNA polynucleotide further comprises a 5′ homology arm at the 5′ end of the 3′ intron fragment.

[0512] In some embodiments, in Formula III or IV, the RNA polynucleotide further comprises a 3′ homology arm at the 3′ end of the 5′ intron fragment.

[0513] In some embodiments, in Formula III or IV, the RNA polynucleotide further comprises a 5′ homology arm at the 5′ end of the 3′ intron fragment, and a 3′ homology arm at the 3′ end of the 5′ intron fragment.

[0514] In some embodiments, in Formula III or IV, the E1 and the E2 are each independently 0 to 20 nucleotides in length.

[0515] In some embodiments, in Formula III or IV, the 5′ intron fragment and the 3′ intron fragment are obtained by segmenting a group II intron at an unpaired region into two fragments, wherein the unpaired region is preferably selected from a linear region between two adjacent domains of the group II intron and a loop region of a stem-loop structure of domain 4 of the group II intron.

[0516] In some embodiments, the 5′ homology arm of the present disclosure includes but is not limited to those listed in Table 109.

[0517] In some embodiments, the 5′ homology arm of the present disclosure comprises a nucleic acid sequence that is at least 90%, at least 91%, at least 92%, at least 93%, at least 94%, at least 95%, at least 96%, at least 97%, at least 98%, at least 99% or at least 100% identical to a 5′ homology arm sequence of Table 109 or a functional portion thereof. In some embodiments, the 5′ homology arm of the present disclosure comprises a combination of more than one (e.g., two, three, or four) nucleic acid sequence that is at least 90%, at least 91%, at least 92%, at least 93%, at least 94%, at least 95%, at least 96%, at least 97%, at least 98%, at least 99% or at least 100% identical to a 5′ homology arm sequence of Table 109 or a functional portion thereof. In some embodiments, the 5′ homology arm of the present disclosure comprises a nucleic acid sequence selected from Table 109 or a functional portion thereof. In some embodiments, the 5′ homology arm of the present disclosure comprises a combination of more than one (e.g., two, three, or four) nucleic acid sequence selected from Table 109 or a functional portion thereof.

[0518] In some embodiments, the 5′ homology arm of the present disclosure is a nucleic acid sequence that is at least 90%, at least 91%, at least 92%, at least 93%, at least 94%, at least 95%, at least 96%, at least 97%, at least 98%, at least 99% or at least 100% identical to a 5′ homology arm sequence of Table 109 or a functional portion thereof. In some embodiments, the 5′ homology arm of the present disclosure is a combination of more than one (e.g., two, three, or four) nucleic acid sequence that is at least 90%, at least 91%, at least 92%, at least 93%, at least 94%, at least 95%, at least 96%, at least 97%, at least 98%, at least 99% or at least 100% identical to a 5′ homology arm sequence of Table 109 or a functional portion thereof. In some embodiments, the 5′ homology arm of the present disclosure is a nucleic acid sequence selected from Table 109 or a functional portion thereof. In some embodiments, the 5′ homology arm of the present disclosure is a combination of more than one (e.g., two, three, or four) nucleic acid sequence selected from Table 109 or a functional portion thereof.

[0519] In some embodiments, the 3′ homology arm of the present disclosure includes but is not limited to those listed in Table 109.

[0520] In some embodiments, the 3′ homology arm of the present disclosure comprises a nucleic acid sequence that is at least 90%, at least 91%, at least 92%, at least 93%, at least 94%, at least 95%, at least 96%, at least 97%, at least 98%, at least 99% or at least 100% identical to a 3′ homology arm sequence of Table 109 or a functional portion thereof. In some embodiments, the 3′ homology arm of the present disclosure comprises a combination of more than one (e.g., two, three, or four) nucleic acid sequence that is at least 90%, at least 91%, at least 92%, at least 93%, at least 94%, at least 95%, at least 96%, at least 97%, at least 98%, at least 99% or at least 100% identical to a 3′ homology arm sequence of Table 109 or a functional portion thereof. In some embodiments, the 3′ homology arm of the present disclosure comprises a nucleic acid sequence selected from Table 109 or a functional portion thereof. In some embodiments, the 3′ homology arm of the present disclosure comprises a combination of more than one (e.g., two, three, or four) nucleic acid sequence selected from Table 109 or a functional portion thereof.

[0521] In some embodiments, the 3′ homology arm of the present disclosure is a nucleic acid sequence that is at least 90%, at least 91%, at least 92%, at least 93%, at least 94%, at least 95%, at least 96%, at least 97%, at least 98%, at least 99% or at least 100% identical to a 3′ homology arm sequence of Table 109 or a functional portion thereof. In some embodiments, the 3′ homology arm of the present disclosure is a combination of more than one (e.g., two, three, or four) nucleic acid sequence that is at least 90%, at least 91%, at least 92%, at least 93%, at least 94%, at least 95%, at least 96%, at least 97%, at least 98%, at least 99% or at least 100% identical to a 3′ homology arm sequence of Table 109 or a functional portion thereof. In some embodiments, the 3′ homology arm of the present disclosure is a nucleic acid sequence selected from Table 109 or a functional portion thereof. In some embodiments, the 3′ homology arm of the present disclosure is a combination of more than one (e.g., two, three, or four) nucleic acid sequence selected from Table 109 or a functional portion thereof.

[0522] In some embodiments, the E1 sequence of the present disclosure includes but is not limited to those listed in Table 103. In some embodiments, the E1 sequence comprises a nucleic acid sequence that is at least 90%, at least 91%, at least 92%, at least 93%, at least 94%, at least 95%, at least 96%, at least 97%, at least 98%, at least 99% or at least 100% identical to the nucleic acid sequence of the E1 sequences of Table 103 or a functional portion thereof. In some embodiments, the E1 sequence is a nucleic acid sequence that is at least 90%, at least 91%, at least 92%, at least 93%, at least 94%, at least 95%, at least 96%, at least 97%, at least 98%, at least 99% or at least 100% identical to the nucleic acid sequence of the E1 sequences of Table 103 or a functional portion thereof.

[0523] In some embodiments, the E2 sequence of the present disclosure includes but is not limited to those listed in Table 104. In some embodiments, the E2 sequence comprises a nucleic acid sequence that is at least 90%, at least 91%, at least 92%, at least 93%, at least 94%, at least 95%, at least 96%, at least 97%, at least 98%, at least 99% or at least 100% identical to the nucleic acid sequence of the E2 sequences of Table 104 or a functional portion thereof. In some embodiments, the E2 sequence is a nucleic acid sequence that is at least 90%, at least 910%, at least 92%, at least 93%, at least 94%, at least 95%, at least 96%, at least 97%, at least 98%, at least 99% or at least 100% identical to the nucleic acid sequence of the E2 sequences of Table 104 or a functional portion thereof.

[0524] In some embodiments, the group II intron sequence of the present disclosure includes but is not limited to those listed in Table 105. In some embodiments, the group II intron sequence comprises a nucleic acid sequence that is at least 90%, at least 91%, at least 92%, at least 93%, at least 94%, at least 95%, at least 96%, at least 97%, at least 98%, at least 99% or at least 100% identical to the nucleic acid sequence of the group II intron sequences of Table 105 or a functional portion thereof. In some embodiments, the group II intron sequence is a nucleic acid sequence that is at least 90%, at least 91%, at least 92%, at least 93%, at least 94%, at least 95%, at least 96%, at least 97%, at least 98%, at least 99% or at least 100% identical to the nucleic acid sequence of the group II intron sequences of Table 105 or a functional portion thereof.

[0525] In some embodiments, the 3′ intron fragment sequence of the present disclosure includes but is not limited to those listed in Table 106. In some embodiments, the 3′ intron fragment sequences comprises a nucleic acid sequence that is at least 90%, at least 91%, at least 92%, at least 93%, at least 94%, at least 95%, at least 96%, at least 97%, at least 98%, at least 99% or at least 100% identical to the nucleic acid sequence of the 3′ intron fragment sequences of Table 106 or a functional portion thereof. In some embodiments, the 3′ intron fragment sequences is a nucleic acid sequence that is at least 90%, at least 91%, at least 92%, at least 93%, at least 94%, at least 95%, at least 96%, at least 97%, at least 98%, at least 99% or at least 100% identical to the nucleic acid sequence of the 3′ intron fragment sequences of Table 106 or a functional portion thereof.

[0526] In some embodiments, the 5′ intron fragment sequence of the present disclosure includes but is not limited to those listed in Table 107. In some embodiments, the 5′ intron fragment sequences comprises a nucleic acid sequence that is at least 90%, at least 91%, at least 92%, at least 93%, at least 94%, at least 95%, at least 96%, at least 97%, at least 98%, at least 99% or at least 100% identical to the nucleic acid sequence of the 5′ intron fragment sequences of Table 107 or a functional portion thereof. In some embodiments, the 5′ intron fragment sequences is a nucleic acid sequence that is at least 90%, at least 91%, at least 92%, at least 93%, at least 94%, at least 95%, at least 96%, at least 97%, at least 98%, at least 99% or at least 100% identical to the nucleic acid sequence of the 5′ intron fragment sequences of Table 107 or a functional portion thereof.

[0527] In some embodiments, in any one of Formulae described herein, n is an integer selected from 0 to 5. In some embodiments, n is an integer selected from 0 to 2. In some embodiments, n is 2. In some embodiments, n is 1. In some embodiments, n is 0.

[0528] In some embodiments, in any one of Formulae described herein, the TI further comprises a second IRES-like polynucleotide sequence. In some embodiments, the first IRES-like polynucleotide sequence and the second IRES-like polynucleotide sequence are the same. In some embodiments, the first IRES-like polynucleotide sequence and the second IRES-like polynucleotide sequence are the different.

[0529] In some embodiments, in any one of Formulae described herein, the IRES-like polynucleotide sequence is determined by any one of the methods described herein. In some embodiments, the IRES-like polynucleotide sequence comprises a nucleic acid sequence of about or at least about 90%, 95%, 97%, 98%, 99% or 100% identical to the nucleic acid sequence of SEQ ID NO: 1025-14161 or 14412-15341. In embodiments, the IRES-like polynucleotide comprises a nucleic acid sequence of about or at least about 90%, 95%, 97%, 98%, 99% or 100% identical to the nucleic acid sequence of SEQ ID NO: 1, 2, 3, 4, 5, 6, 8, 9, 10, 11, 12, 13, 14, 15, 17, 22, 23, 25, 58, 62.

[0530] In some embodiments, in any one of Formulae described herein, the IRES-like sequence is greater than or equal to 3 residues in length. In some embodiments, the IRES-like sequence is 3-300 nucleic acid residues in length. In some embodiments, the IRES-like sequence is 3-200 nucleic acid residues in length. In some embodiments, IRES-like sequence is 3, 4, 5, 6, 7, 8, 9, 10, 11, 12, 13, 14, 15, 16, 17, 18, 19, 20, 21, 22, 23, 24, 25, 26, 27, 28, 29, 30, 31, 32, 33, 34, 35, 36, 37, 38, 39, 40, 41, 42, 43, 44, 45, 46, 47, 48, 49, 50, 51, 52, 54, 55, 56, 57, 58, 59, 60, 61, 62, 63, 64, 65, 66, 67, 68, 69, 70, 81, 82, 83, 84, 85, 86, 87, 88, 89, 90, 91, 92, 93, 94, 95, 96, 97, 98, 99, or 100 nucleic acid residues in length. In some embodiments, the IRES-like sequence is 5 nucleic acid residues in length. In some embodiments, the IRES-like sequence is 6 nucleic acid residues in length. In some embodiments, the IRES-like sequence is 7 nucleic acid residues in length. In some embodiments, the IRES-like sequence is 8 nucleic acid residues in length. In some embodiments, the IRES-like sequence is 9 nucleic acid residues in length. In some embodiments, the IRES-like sequence is 10 nucleic acid residues in length. In some embodiments, the IRES-like sequence is 11 nucleic acid residues in length. In some embodiments, the IRES-like sequence is 12 nucleic acid residues in length.

[0531] In some embodiments, in any one of Formulae described herein, the TI (i.e., an engineered translation initiation element comprising an IRES-like polynucleotide sequence) further comprises an IRES sequence that is isolated or derived from a natural IRES sequence. In some embodiments, the natural IRES sequence comprises a nucleic acid sequence that is at least 90%, at least 91%, at least 92%, at least 93%, at least 94%, at least 95%, at least 96%, at least 97%, at least 98%, at least 99% or 100% identical to the nucleic acid sequence of any one of the natural IRES sequences of Tables 98-100 or a functional portion thereof.

### 8.4.1. Expression Sequence

[0532] In some embodiments, an RNA polynucleotide provided herein comprise a expression sequence encoding a therapeutic product (Z1). In some embodiments, the expression sequence encodes a reporter protein. In some embodiments, the expression sequence encodes a therapeutic protein. Exemplary expression sequences include but are not limited to those listed in Tables 101 and 102.

[0533] In some embodiments, an RNA polynucleotide comprises one expression sequence. In some embodiments, a polynucleotide comprises more than one expression sequence, e.g., 2, 3, 4, or 5 expression sequences.

[0534] In some embodiments, an RNA polynucleotide encodes a protein that is made up of subunits that are encoded by more than one gene. For example, the protein may be a heterodimer, wherein each chain or subunit of the protein is encoded by a separate gene. It is possible that more than one RNA polynucleotide is delivered in the transfer vehicle and each RNA polynucleotide encodes a separate subunit of the protein. Alternatively, a single RNA polynucleotide may be engineered to encode more than one subunit. In some embodiments, separate RNA polynucleotide molecules encoding the individual subunits may be administered in separate transfer vehicles.

### 8.4.2. Linkers

[0535] In some embodiments, an RNA polynucleotide provided herein comprises a linker sequence (L). In some embodiments, the linker sequence is 3-300 nucleic acid residues in length. In some embodiments the linker sequence is about 3-10, 10-20, 20-30, 30-40, 40-50, 50-60, 60-70, 70-80, 80-90, 90-100, 100-125, 125-150, 150-175, 175-200, 200-225, 225-250, 250-275 or 275-300 nucleic acid sequences in length. In some embodiments, the linker sequence is about 3N nucleic acid residues in length, wherein N is an integer selected from 1-100. In some embodiments, the linker sequence is about 3N nucleic acid residues in length, wherein N is an integer selected from 1-50. In some embodiments, the linker sequence is about 3N nucleic acid residues in length, wherein N is an integer selected from 1-20. In some embodiments, the linker sequence is about 3N nucleic acid residues in length, wherein N is an integer selected from 1-10. In some embodiments, the linker sequence is about 3N nucleic acid residues in length, wherein N is 1, 2, 3, 4 or 5. In some embodiments, the linker sequence is about 3N nucleic acid residues in length, wherein N is 1, 2 or 3. In some embodiments, the linker sequence is about 3 nucleic acid residues in length.

[0536] In some embodiments, the linker sequence comprises the nucleic acid sequence of RCC, wherein R is a guanine or an adenine. In some embodiments, the linker comprises the nucleic acid sequence of RCCRCC, wherein R is a guanine or an adenine. In some embodiments, the linker comprises the nucleic acid sequence of RCCRCCRCC, wherein R is a guanine or an adenine.

[0537] In some embodiments, the linker comprises a nucleic acid sequence that encodes a 5′UTR, 3′UTR, poly-A sequence, polyA-C sequence, poly-C sequence, poly-U sequence, poly-G sequence, ribosome binding site, aptamer, riboswitch, ribozyme, small RNA binding site, translation regulation elements (e.g., a Kozak sequence), a protein binding site (e.g., PTBP1 or HUR) a non-natural nucleotide, or a non-nucleotide chemical-linker sequence.

[0538] In some embodiments, the RNA polynucleotides provided herein comprise a 3′ UTR. In some embodiments, the 3′ UTR is from human beta globin, human alpha globin xenopus beta globin, xenopus alpha globin, human prolactin, human GAP-43, human eEF1a1, human Tau, human TNFa, dengue virus, hantavirus small mRNA, bunyavirus small mRNA, turnip yellow mosaic virus, hepatitis C virus, rubella virus, tobacco mosaic virus, human IL-8, human actin, human GAPDH, human tubulin, hibiscus chlorotic linsgspot virus, woodchuck hepatitis virus post translationally regulated element, sindbis virus, turnip crinkle virus, tobacco etch virus, or Venezuelan equine encephalitis virus.

[0539] In some embodiments, the RNA polynucleotides provided herein comprise a 5′ UTR. In some embodiments, the 5′ UTR is from human beta globin, Xenopus laevis beta globin, human alpha globin, Xenopus laevis alpha globin, rubella virus, tobacco mosaic virus, mouse Gtx, dengue virus, heat shock protein 70 kDa protein 1A, tobacco alcohol dehydrogenase, tobacco etch virus, turnip crinkle virus, or the adenovirus tripartite leader.

[0540] In some embodiments, the RNA polynucleotides provided herein comprises a polyA region. In some embodiments the polyA region is at least 30 nucleotides or at least 60 nucleotides in length.

[0541] In some embodiments, the RNA polynucleotide described herein is circularized via a ligation reaction. In some embodiments, the RNA polynucleotide described herein is circularized in the presence of a T4 ligase. In some embodiments, the RNA polynucleotide described herein the RNA polynucleotide is circularized in the absence of a T4 ligase.

[0542] In some embodiments, the RNA polynucleotide described herein is circularized via a splicing reaction. In some embodiments, the RNA polynucleotide described herein is circularized in the presence of a spliceosome. In some embodiments, the RNA polynucleotide described herein is circularized in the absence of a spliceosome.

[0543] In some embodiments, the RNA polynucleotide described herein is circularized via a self-splicing reaction.

### 8.4.3. Vectors, Linear RNA, Pre-Cursor RNA, and Circular RNA

[0544] In some embodiments, the RNA polynucleotide provided herein is a single stranded RNA. In some embodiments, the polynucleotide is a linear RNA. In some embodiments, provided herein is a precursor RNA. In some embodiments, provided the RNA polynucleotide is encoded by a vector. In some embodiments, the precursor RNA is a linear RNA produced by in vitro transcription of a vector provided herein.

[0545] In some embodiments, the RNA polynucleotide is circular RNA or is useful for making a circular RNA polynucleotide. In some embodiments, provided herein is a circular RNA. In some embodiments, the circular RNA is a circular RNA produced by a vector provided herein. In some embodiments, the circular RNA is circular RNA produced by circularization of a precursor RNA provided herein.

### Circular RNAs

[0546] Circular RNAs (also referred to as “circRNAs” or “cRNAs”) are single-stranded RNAs that are joined head to tail. circRNAs have been recognized as a pervasive class of noncoding RNAs in eukaryotic cells. Typically generated through back splicing, circRNAs are found to be very stable.

[0547] A circular RNA may be generated by any suitable method known in the art or disclosed herein. Exemplary methods of generating circular RNA are described in WO2021263124, Wesselhoeft, R. A. et al., Nat. Commun. 9, 2629 (2018), and Chinese Patent Application No. 202110594352.4, each of which are incorporated herein in its entirety.

[0548] Circular RNAs can be generated by any non-mammalian splicing method. For example, linear RNAs containing various types of introns, including self-splicing group I introns, self-splicing group II introns, spliceosomal introns, and tRNA introns can be circularized. In particular, group I and group II introns have the advantage that they can be readily used for production of circular RNAs in vitro as well as in vivo because of their ability to undergo self-splicing due to their autocatalytic ribozyme activity.

[0549] Alternatively, circular RNAs can be produced in vitro from a linear RNA by chemical or enzymatic ligation of the 5′ and 3′ ends of the RNA. Chemical ligation can be performed, for example, using cyanogen bromide (BrCN) or ethyl-3-(3-dimethylaminopropyl) carbodiimide (EDC) for activation of a nucleotide phosphomonoester group to allow phosphodiester bond formation (Sokolova, FEBS Lett, 232: 153-155 (1988); Dolinnaya et al., Nucleic Acids Res., 19: 3067-3072 (1991); Fedorova, Nucleosides Nucleotides Nucleic Acids, 15: 1137-1147 (1996)). Alternatively, enzymatic ligation can be used to circularize RNA. Exemplary ligases that can be used include T4 DNA ligase (T4 Dnl), T4 RNA ligase 1 (T4 Rnl 1), and T4 RNA ligase 2 (T4 Rnl2).

[0550] In some embodiments, splint ligation may be used to generate circular RNAs. Splint ligation involves the use of an oligonucleotide splint that hybridizes with the two ends of a linear RNA to bring the ends of the linear RNA together for ligation. Hybridization of the splint, which can be either a deoxyribo-oligonucleotide or a ribooligonucleotide, orients the 5-phosphate and 3-OH of the RNA ends for ligation. Subsequent ligation can be performed using either chemical or enzymatic techniques, as described above. Enzymatic ligation can be performed, for example, with T4 DNA ligase (DNA splint required), T4 RNA ligase 1 (RNA splint required) or T4 RNA ligase 2 (DNA or RNA splint). Chemical ligation, such as with BrCN or EDC, is more efficient in some cases than enzymatic ligation if the structure of the hybridized splint-RNA complex interferes with enzymatic activity (see, e.g., Dolinnaya et al. Nucleic Acids Res, 2/(23): 5403-5407 (1993); Petkovic et al., Nucleic Acids Res, 43(4): 2454-2465 (2015)).

[0551] While circular RNAs generally are more stable than their linear counterparts, primarily due to the absence of free ends necessary for exonuclease-mediated degradation, additional modifications may be made to the recombinant circRNA described herein to further improve stability. Still other kinds of modifications may improve circularization efficiency, purification of circRNA, and/or protein expression from circRNA. For example, the recombinant circRNA may be engineered to include “homology arms” (i.e., 9-19 nucleotides in length placed at the 5′ and 3′ ends of a precursor RNA with the aim of bringing the 5′ and 3′ splice sites into proximity of one another), spacer sequences (i.e., linker sequences), and/or a phosphorothioate (PS) cap (Wesselhoeft et al., Nat. Commun., 9: 2629 (2018)). The recombinant circRNA also may be engineered to include 2′-O-methyl fluoro- or —O-methoxyethyl conjugates, phosphorothioate backbones, or 2′,4′-cyclic 2′-O-ethyl modifications to increase the stability (Holdt et al., Front Physiol., 9: 1262 (2018); Kratzfeldt et al., Nature, 438(7068): 685-9 (2005); and Crooke et al., CellMetab., 27(4): 714-739 (2018)). The recombinant circRNA molecule also may comprise one or more modifications that reduce the innate immunogenicity of the circRNA molecule in a host, such as at least one N6-methyladenosine (m⁶A).

[0552] In some embodiments, the recombinant circular RNA molecule is encoded by a nucleic acid that comprises at least two introns and at least one exon. In some embodiments, a DNA sequence encoding a circular RNA molecule comprises sequences that encode at least two introns and at least one exon. The term “exon,” as used herein, refers to a nucleic acid sequence present in a gene which is represented in the mature form of an RNA molecule after excision of introns during transcription. Exons may be translated into protein (e.g., in the case of messenger RNA (mRNA)). The term “intron,” as used herein, refers to a nucleic acid sequence present in a given gene which is removed by RNA splicing during maturation of the final RNA product. Introns are generally found between exons. During transcription, introns are removed from precursor messenger RNA (pre-mRNA), and exons are joined via RNA splicing. In some embodiments, the recombinant circular RNA molecule comprises a nucleic acid sequence which includes one or more exons and one or more introns.

[0553] Accordingly, circular RNAs can be generated by splicing of either an endogenous or exogenous intron, as described in WO 2017/222911, incorporated by reference herein in its entirety. As used herein, the term “endogenous intron” means an intron sequence that is native to the host cell in which the circRNA is produced. For example, a human intron is an endogenous intron when the circRNA is expressed in a human cell. An “exogenous intron” means an intron that is heterologous to the host cell in which the circRNA is generated. For example, a bacterial intron would be an exogenous intron when the circRNA is expressed in a human cell. Numerous intron sequences from a wide variety of organisms and viruses are known and include sequences derived from genes encoding proteins, ribosomal RNA (rRNA), or transfer RNA (tRNA). Representative intron sequences are available in various databases, including the Group I Intron Sequence and Structure Database (ma.whu.edu.cn/gissd/), the Database for Bacterial Group II Introns (webapps2.ucalgary.ca/-groupii/index.html), the Database for Mobile Group II Introns (fp.ucalgary.ca/group2introns), the Yeast Intron DataBase (emblS16 heidelberg.de/Extemallnfo/seraphin/yidb.html), the Ares Lab Yeast Intron Database (compbio. soe.ucsc. edu/yeast_introns.html), the U12 Intron Database (genome.crg.es/cgibin/ul2db/ul2db.cgi), and the Exon-Intron Database (bpg.utoledo.edu/-afedorov/lab/eid.html).

[0554] In some embodiments, the RNA polynucleotide (e.g., circular RNA) may be of any length or size. In some embodiments the RNA polynucleotide is between 300 and 10000, 400 and 9000, 500 and 8000, 600 and 7000, 700 and 6000, 800 and 5000, 900 and 5000, 1000 and 5000, 1100 and 5000, 1200 and 5000, 1300 and 5000, 1400 and 5000, and/or 1500 and 5000 nucleotides in length.

[0555] In some embodiments, the RNA polynucleotide (e.g., circular RNA) is at least 300 nt, 400 nt, 500 nt, 600 nt, 700 nt, 800 nt, 900 nt, 1000 nt, 1100 nt, 1200 nt, 1300 nt, 1400 nt, 1500 nt, 2000 nt, 2500 nt, 3000 nt, 3500 nt, 4000 nt, 4500 nt, or 5000 nt in length. In some embodiments, the RNA polynucleotide is no more than 3000 nt, 3500 nt, 4000 nt, 4500 nt, 5000 nt, 6000 nt, 7000 nt, 8000 nt, 9000 nt, or 10000 nt in length.

[0556] In some embodiments, the RNA polynucleotide (e.g., circular RNA) is about 300 nt, 400 nt, 500 nt, 600 nt, 700 nt, 800 nt, 900 nt, 1000 nt, 1100 nt, 1200 nt, 1300 nt, 1400 nt, 1500 nt, 2000 nt, 2500 nt, 3000 nt, 3500 nt, 4000 nt, 4500 nt, 5000 nt, 6000 nt, 7000 nt, 8000 nt, 9000 nt, or 10000 nt in length.

[0557] In some embodiments, the RNA polynucleotide (e.g., circular RNA) is at least 500, 600, 700, 800, 900, 1000, 1500, 2000, 2500, 3000, 3500, 4000, 4500, 5000, 5500, 6000, 6500, 7000, 7500, 8000, 8500, 9000, 9500 or 10000 nt in length. The RNA polynucleotide (e.g., circular RNA) can be unmodified, partially modified or completely modified.

[0558] In some embodiments, the circular RNA provided herein has higher functional stability than mRNA comprising the same expression sequence. In some embodiments, the circular RNA provided herein has higher functional stability than mRNA comprising the same expression sequence, 5moU modifications, an optimized UTR, a cap, and/or a polyA tail.

[0559] In some embodiments, the circular RNA polynucleotide provided herein has a functional half-life of at least 5 hours, 10 hours, 15 hours, 20 hours. 30 hours, 40 hours, 50 hours, 60 hours, 70 hours or 80 hours. In some embodiments, the circular RNA polynucleotide provided herein has a functional half-life of 5-80, 10-70, 15-60, and/or 20-50 hours. In some embodiments, the circular RNA polynucleotide provided herein has a functional half-life greater than (e.g., at least 1.5-fold greater than, at least 2-fold greater than) that of an equivalent linear RNA polynucleotide encoding the same protein. In some embodiments, functional half-life can be assessed through the detection of functional protein synthesis.

[0560] In some embodiments, the circular RNA polynucleotide provided herein has a half-life of at least 5 hours, 10 hours, 15 hours, 20 hours. 30 hours, 40 hours, 50 hours, 60 hours, 70 hours or 80 hours. In some embodiments, the circular RNA polynucleotide provided herein has a half-life of 5-80, 10-70, 15-60, and/or 20-50 hours. In some embodiments, the circular RNA polynucleotide provided herein has a half-life greater than (e.g., at least 1.5-fold greater than, at least 2-fold greater than) that of an equivalent linear RNA polynucleotide encoding the same protein.

[0561] In some embodiments, the circular RNA provided herein may have a higher magnitude of expression than equivalent linear mRNA, e.g., a higher magnitude of expression 24 hours after administration of RNA to cells. In some embodiments, the circular RNA provided herein has a higher magnitude of expression than mRNA comprising the same expression sequence, 5moU modifications, an optimized UTR, a cap, and/or a polyA tail. In some embodiments, the circular RNA provided herein may have higher stability than an equivalent linear mRNA. In some embodiments, this may be shown by measuring receptor presence and density in vitro or in vivo post electroporation, with time points measured over 1 week. In some embodiments, this may be shown by measuring RNA presence via qPCR or ISH.

[0562] In some embodiments, a circular RNA polynucleotide provided herein comprises modified RNA nucleotides and/or modified nucleosides. In some embodiments, the modified nucleoside is m⁵C (5-methylcytidine). In some embodiments, the modified nucleoside is m⁵U (5-methyluridine). In some embodiments, the modified nucleoside is m⁶A (N⁶-methyladenosine). In some embodiments, the modified nucleoside is s²U (2-thiouridine). In some embodiments, the modified nucleoside is Y (pseudouridine). In some embodiments, the modified nucleoside is Um (2′-O-methyluridine). In some embodiments, the modified nucleoside is m¹A (1-methyladenosine); m²A (2-methyladenosine); Am (2′-0-methyladenosine); ms² m⁶A (2-methylthio-N⁶-methyladenosine); i⁶A (N⁶-isopentenyladenosine); ms2i6A (2-methylthio-N⁶ isopentenyladenosine); io⁶A (N⁶-(cis-hydroxyisopentenyl)adenosine); ms²io⁶A (2-methylthio-N⁶-(cis-hydroxyisopentenyl)adenosine); g⁶A (N⁶-glycinylcarbamoyladenosine); t⁶A (N⁶-threonylcarbamoyladeno sine); ms²t⁶A (2-methylthio-N⁶-threonyl carbamoyladenosine); m⁶t⁶A (N⁶-methyl-N⁶-threonylcarbamoyladenosine); hn⁶A(N⁶-hydroxynorvalylcarbamoyladenosine); ms²hn⁶A (2-methylthio-N⁶-hydroxynorvalyl carbamoyladenosine); Ar(p) (2′-0-ribosyladenosine (phosphate)); I (inosine); m¹I (1-methylinosine); m¹hn (1,2′-O-dimethylinosine); m³C (3-methylcytidine); Cm (2′-0-methylcytidine); s²C (2-thiocytidine); ac⁴C (N⁴-acetylcytidine); (5-formylcytidine); m⁵Cm (5,2′-O-dimethylcytidine); ac⁴Cm (N⁴-acetyl-2′-O-methylcytidine); k²C (lysidine); m¹G (1-methylguanosine); m²G (N²-methylguanosine); m⁷G (7-methylguanosine); Gm (2′-0-methylguanosine); m² 2G (N²,N²-dimethylguanosine); m²Gm (N²,2′-O-dimethylguanosine); m² aGm (N²,N²,2′-O-trimethylguanosine); Gr(p) (2′-0-ribosylguanosine(phosphate)); yW (wybutosine); oayW (peroxywybutosine); OHyW (hydroxy wybutosine); OHyW* (undermodified hydroxywybutosine); imG (wyosine); mimG (methylwyosine); Q (queuosine); oQ (epoxyqueuosine); galQ (galactosyl-queuosine); manQ (mannosyl-queuosine); preQo (7-cyano-7-deazaguanosine); preQi (7-aminomethyl-7-deazaguanosine); G⁺ (archaeosine); D (dihydrouridine); m⁵Um (5,2′-0-dimethyluridine); s⁴U (4-thiouridine); m⁵s²U (5-methyl-2-thiouridine); s²Um (2-thio-2′-0-methyluridine); acp³U (3-(3-amino-3-carboxypropyl)uridine); ho⁵U (5-hydroxyuridine); mo⁵U (5-methoxyuridine); cmo⁵U (uridine 5-oxy acetic acid); mcmo⁵U (uridine 5-oxy acetic acid methyl ester); chm⁵U (5-(carboxyhydroxymethyl)uridine)); mchm⁵U (5-(carboxyhydroxymethyl)uridine methyl ester); mcm⁵U (5-methoxycarbonylmethyluridine); mcm⁵Um (5-methoxycarbonylmethyl-2′-0-methyluridine); mcm⁵s²U (5-methoxycarbonylmethyl-2-thiouridine); nm⁵s²U (5-aminomethyl-2-thiouridine); mnm⁵U (5-methylaminomethyluridine); mnm⁵s2U (5-methylaminomethyl-2-thiouridine); mnm⁵se²U (5-methylaminomethyl-2-selenouridine); ncm⁵U (5-carbamoylmethyluridine); ncm^{S}Um (5-carbamoylmethyl-2′-O-methyluridine); cmnm⁵U (5-carboxymethylaminomethyluridine); cmnm⁵Um (5-carboxymethylaminomethyl-2′-0-methyluridine); cmnm⁵s²U (5-carboxymethylaminomethyl-2-thiouridine); m⁶₂A (N⁶,N⁶-dimethyladenosine); Im (2′-0-methylinosine); m⁴C (N⁴-methylcytidine); m⁴Cm (N⁴,2′-0-dimethylcytidine); hm⁵C (5-hydraxymethylcytidine); m³U (3-methyluridine); cm⁵U (5-carboxymethyluridine); m⁶Am (N⁶,2′-O-dimethyladenosine); m⁶₂Am (N⁶,N⁶,0-2′-trimethyladenosine); m²,7G (N²,7-dimethylguanosine); m^{2,2,7}G (N²,N²,7-trimethylguanosine); m³Um (3,2′-0-dimethyluridine); m⁵D (5-methyldihydrouridine); f⁵Cm (5-formyl-2′-O-methylcytidine); m′Gm (1,2′-0-dimethylguanosine); m′Am (1,2′-0-dimethyladenosine); rm⁵U (5-taurinomethyluridine); τm5s2U (5-taurinomethyl-2-thiouridine)); imG-14 (4-demethylwyosine); imG2 (isowyosine); or ac⁶A (N⁶-acetyladenosine).

[0563] In some embodiments, the modified nucleoside may include a compound selected from the group of: pyridin-4-one ribonucleoside, 5-aza-uridine, 2-thio-5-aza-uridine, 2-thiouridine, 4-thio-pseudouridine, 2-thio-pseudouridine, 5-hydroxyuridine, 3-methyluridine, 5-carboxymethyl-uridine, 1-carboxymethyl-pseudouridine, 5-propynyl-uridine, 1-propynyl-pseudouridine, 5-taurinomethyluridine, 1-taurinomethyl-pseudouridine, 5-taurinomethyl-2-thio-uridine, 1-taurinomethyl-4-thio-uridine, 5-methyl-uridine, 1-methyl-pseudouridine, 4-thio-1-methyl-pseudouridine, 2-thio-1-methyl-pseudouridine, 1-methyl-1-deaza-pseudouridine, 2-thio-1-methyl-1-deaza-pseudouridine, dihydrouridine, dihydropseudouridine, 2-thio-dihydrouridine, 2-thio-dihydropseudouridine, 2-methoxyuridine, 2-methoxy-4-thio-uridine, 4-methoxy-pseudouridine, 4-m ethoxy-2-thio-pseudouridine, 5-aza-cytidine, pseudoisocytidine, 3-methyl-cytidine, N4-acetylcytidine, 5-formylcytidine, N4-methylcytidine, 5-hydroxymethylcytidine, I-methyl-pseudoisocytidine, pyrrolo-cytidine, pyrrolo-pseudoisocytidine, 2-thio-cytidine, 2-thio-5-methyl-cytidine, 4-thio-pseudoisocytidine, 4-thio-i-methyl-pseudoisocytidine, 4-thio-i-methyl-1-deaza-pseudoisocytidine, 1-methyl-1-deaza-pseudoisocytidine, zebularine, 5-aza-zebularine, 5-methyl-zebularine, 5-aza-2-thio-zebularine, 2-thio-zebularine, 2-methoxy-cytidine, 2-methoxy-5-methyl-cytidine, 4-methoxy-pseudoisocytidine, 4-methoxy-1-methyl-pseudoisocytidine, 2-aminopurine, 2, 6-diaminopurine, 7-deaza-adenine, 7-deaza-8-aza-adenine, 7-deaza-2-aminopurine, 7-deaza-8-aza-2-aminopurine, 7-deaza-2, 6-diaminopurine, 7-deaza-8-aza-2, 6-diaminopurine, 1-methyladenosine, N6-methyladenosine, N6-isopentenyladenosine, N6-(cis-hydroxyisopentenyl)adenosine, 2-methylthio-N6-(cis-hydroxyisopentenyl) adenosine, N6-glycinylcarbamoyladenosine, N6-threonylcarbamoyladenosine, 2-methylthio-N6-threonyl carbamoyladenosine, N6,N6-dimethyladenosine, 7-methyladenine, 2-methylthio-adenine, 2-methoxy-adenine, inosine, I-methyl-inosine, wyosine, wybutosine, 7-deaza-guanosine, 7-deaza-8-aza-guanosine, 6-thio-guanosine, 6-thio-7-deaza-guanosine, 6-thio-7-deaza-8-aza-guanosine, 7-methyl-guanosine, 6-thio-7-methyl-guanosine, 7-methylinosine, 6-methoxy-guanosine, I-methylguanosine, N2-methylguanosine, N2,N2-dimethylguanosine, 8-oxo-guanosine, 7-methyl-8-oxo-guanosine, 1-methyl-6-thio-guanosine, N2-methyl-6-thio-guanosine, and N2,N2-dimethyl-6-thio-guanosine. In some embodiments, the modifications are independently selected from the group consisting of 5-methylcytosine, pseudouridine and 1-methylpseudouridine.

[0564] In some embodiments, polynucleotides may be codon-optimized. A codon optimized sequence may be one in which codons in a polynucleotide encoding a therapeutic product have been substituted in order to increase the expression, stability and/or activity of the therapeutic product. Factors that influence codon optimization include, but are not limited to one or more of: (i) variation of codon biases between two or more organisms or genes or synthetically constructed bias tables, (ii) variation in the degree of codon bias within an organism, gene, or set of genes, (iii) systematic variation of codons including context, (iv) variation of codons according to their decoding tRNAs, (v) variation of codons according to GC %, either overall or in one position of the triplet, (vi) variation in degree of similarity to a reference sequence for example a naturally occurring sequence, (vii) variation in the codon frequency cutoff, (viii) structural properties of mRNAs transcribed from the DNA sequence, (ix) prior knowledge about the function of the DNA sequences upon which design of the codon substitution set is to be based, and/or (x) systematic variation of codon sets for each amino acid. In some embodiments, a codon optimized polynucleotide may minimize ribozyme collisions and/or limit structural interference between the expression sequence and the IRES.

### 8.4.4. RNA Polynucleotide Production

[0565] The vectors provided herein can be made using standard techniques of molecular biology. For example, the various elements of the vectors provided herein can be obtained using recombinant methods, such as by screening cDNA and genomic libraries from cells, or by deriving the polynucleotides from a vector known to include the same.

[0566] The various elements of the vectors provided herein can also be produced synthetically, rather than cloned, based on the known sequences. The complete sequence can be assembled from overlapping oligonucleotides prepared by standard methods and assembled into the complete sequence. See, e.g., Edge, Nature (1981) 292:756; Nambair et al, Science (1984) 223 1299; and Jay et al, J. Biol. Chem. (1984) 259:631 1.

[0567] Thus, particular nucleotide sequences can be obtained from vectors harboring the desired sequences or synthesized completely, or in part, using various oligonucleotide synthesis techniques known in the art, such as site-directed mutagenesis and polymerase chain reaction (PCR) techniques where appropriate. One method of obtaining nucleotide sequences encoding the desired vector elements is by annealing complementary sets of overlapping synthetic oligonucleotides produced in a conventional, automated polynucleotide synthesizer, followed by ligation with an appropriate DNA ligase and amplification of the ligated nucleotide sequence via PCR. See, e.g., Jayaraman et al, Proc. Natl. Acad. Sci. USA (1991) 88:4084-4088. Additionally, oligonucleotide-directed synthesis (Jones et al, Nature (1986) 54:75-82), oligonucleotide directed mutagenesis of preexisting nucleotide regions (Riechmann et al, Nature (1988) 332:323-327 and Verhoeyen et al., Science (1988) 239: 1534-1536), and enzymatic filling-in of gapped oligonucleotides using T4 DNA polymerase (Queen et al, Proc. Natl. Acad. Sci. USA (1989) 86: 10029-10033) can be used.

[0568] The precursor RNA provided herein can be generated by incubating a vector provided herein under conditions permissive of transcription of the precursor RNA encoded by the vector. For example, in some embodiments a precursor RNA is synthesized by incubating a vector provided herein that comprises an RNA polymerase promoter upstream of its 5′ duplex forming region and/or expression sequence with a compatible RNA polymerase enzyme under conditions permissive of in vitro transcription. In some embodiments, the vector is incubated inside of a cell by a bacteriophage RNA polymerase or in the nucleus of a cell by host RNA polymerase P.

[0569] In some embodiments, provided herein is a method of generating precursor RNA by performing in vitro transcription using a vector provided herein as a template (e.g., a vector provided herein with an RNA polymerase promoter positioned upstream of the 5′ homology region).

[0570] In some embodiments, the resulting precursor RNA can be used to generate circular RNA (e.g., a circular RNA polynucleotide provided herein).

[0571] Thus, in some embodiments provided herein is a method of making circular RNA. In some embodiments, the method comprises synthesizing precursor RNA by transcription (e.g., run-off transcription) using a vector provided herein as a template, and incubating the resulting precursor RNA in conditions suitable for circularization, to form circular RNA.

[0572] In some embodiments, a composition comprising circular RNA has been purified. Circular RNA may be purified by any known method commonly used in the art, such as column chromatography, gel filtration chromatography, and size exclusion chromatography. In some embodiments, purification comprises one or more of the following steps: phosphatase treatment, HPLC size exclusion purification, and RNase R digestion. In some embodiments, purification comprises the following steps in order: RNase R digestion, phosphatase treatment, and HPLC size exclusion purification. In some embodiments, purification comprises reverse phase HPLC. In some embodiments, a purified composition contains less double stranded RNA, DNA splints, triphosphorylated RNA, phosphatase proteins, protein ligases, capping enzymes and/or nicked RNA than unpurified RNA.

### 8.5. Formulations and Delivery

[0573] In some embodiments, the polynucleotide or circular RNA disclosed herein can be formulated using liposomes, lipoplexes, lipid nanoparticles, polymer based delivery systems, and viral vectors. In some embodiments, the polynucleotide or circular RNA may be formulated in a lipid nanoparticle such as those described in WO2012170930, herein incorporated by reference in its entirety. In some embodiments, the lipid may be a cleavable lipid such as those described in WO2012170889, herein incorporated by reference in its entirety. In some embodiments, the pharmaceutical compositions of the polynucleotide or circular RNA may include at least one of the PEGylated lipids described in WO2012099755, herein incorporated by reference. In some embodiments, a lipid nanoparticle formulation may be formulated by the methods described in WO2011127255 or WO2008103276, each of which is herein incorporated by reference in its entirety. A lipid nanoparticle may be coated or associated with a co-polymer such as, but not limited to, a block co-polymer, such as a branched polyether-polyamide block copolymer described in WO2013012476, herein incorporated by reference in its entirety. Liposomes, lipoplexes, or lipid nanoparticles may be used to improve the efficacy of the polynucleotide or circular RNA directed protein production as these formulations may be able to increase cell transfection by the polynucleotide and circular RNA, increase the in vivo or in vitro half-life of the polynucleotide and circular RNA, and/or allow for controlled release.

[0574] In some embodiments, a polynucleotide or circular RNA disclosed herein encodes a protein that is made up of subunits that are encoded by more than one gene. For example, the protein may be a heterodimer, wherein each chain or subunit of the protein is encoded by a separate gene. It is possible that more than one polynucleotide or circular RNA molecule is delivered in the transfer vehicle and each polynucleotide or circular RNA encodes a separate subunit of the protein. Alternatively, a single polynucleotide or circular RNA molecule may be engineered to encode more than one subunit. In some embodiments, separate polynucleotide or circular RNA molecules encoding the individual subunits may be administered in separate transfer vehicles.

[0575] The present disclosure contemplates the discriminatory targeting of target cells and tissues by both passive and active targeting means. The phenomenon of passive targeting exploits the natural distribution patterns of a transfer vehicle in vivo without relying upon the use of additional excipients or means to enhance recognition of the transfer vehicle by target cells. For example, transfer vehicles which are subject to phagocytosis by the cells of the reticulo-endothelial system are likely to accumulate in the liver or spleen, and accordingly, may provide a means to passively direct the delivery of the compositions to such target cells.

[0576] Alternatively, the present disclosure contemplates active targeting, which involves the use of targeting moieties that may be bound (either covalently or non-covalently) to the transfer vehicle to encourage localization of such transfer vehicle at certain target cells or target tissues. For example, targeting may be mediated by the inclusion of one or more endogenous targeting moieties in or on the transfer vehicle to encourage distribution to the target cells or tissues. Recognition of the targeting moiety by the target tissues actively facilitates tissue distribution and cellular uptake of the transfer vehicle and/or its contents in the target cells and tissues (e.g., the inclusion of an apolipoprotein-E targeting ligand in or on the transfer vehicle encourages recognition and binding of the transfer vehicle to endogenous low density lipoprotein receptors expressed by hepatocytes). As provided herein, the composition can comprise a moiety capable of enhancing affinity of the composition to the target cell. Targeting moieties may be linked to the outer bilayer of the lipid particle during formulation or post-formulation. These methods are well known in the art. In addition, some lipid particle formulations may employ fusogenic polymers such as PEAA, hemagglutinin, other lipopeptides (see U.S. Pat. No. 6,417,326, which is incorporated herein by reference) and other features useful for in vivo and/or intracellular delivery. In other some embodiments, the compositions of the present disclosure demonstrate improved transfection efficacies, and/or demonstrate enhanced selectivity towards target cells or tissues of interest. Contemplated therefore are compositions which comprise one or more moieties (e.g., peptides, aptamers, oligonucleotides, a vitamin or other molecules) that are capable of enhancing the affinity of the compositions and their nucleic acid contents for the target cells or tissues. Suitable moieties may optionally be bound or linked to the surface of the transfer vehicle. In some embodiments, the targeting moiety may span the surface of a transfer vehicle or be encapsulated within the transfer vehicle. Suitable moieties and are selected based upon their physical, chemical or biological properties (e.g., selective affinity and/or recognition of target cell surface markers or features). Cell-specific target sites and their corresponding targeting ligand can vary widely. Suitable targeting moieties are selected such that the unique characteristics of a target cell are exploited, thus allowing the composition to discriminate between target and non-target cells. For example, compositions of the disclosure may include surface markers (e.g., apolipoprotein-B or apolipoprotein-E) that selectively enhance recognition of, or affinity to hepatocytes (e.g., by receptor-mediated recognition of and binding to such surface markers). As an example, the use of galactose as a targeting moiety would be expected to direct the compositions of the present disclosure to parenchymal hepatocytes, or alternatively the use of mannose containing sugar residues as a targeting ligand would be expected to direct the compositions of the present disclosure to liver endothelial cells (e.g., mannose containing sugar residues that may bind preferentially to the asialoglycoprotein receptor present in hepatocytes). (See Hillery A M, et al. “Drug Delivery and Targeting: For Pharmacists and Pharmaceutical Scientists” (2002) Taylor & Francis, Inc.) The presentation of such targeting moieties that have been conjugated to moieties present in the transfer vehicle (e.g., a lipid nanoparticle) therefore facilitate recognition and uptake of the compositions of the present disclosure in target cells and tissues. Examples of suitable targeting moieties include one or more peptides, proteins, aptamers, vitamins and oligonucleotides.

[0577] In some embodiments, the polynucleotide or circular RNA disclosed herein is formulated according to a process described in U.S. Pub. No. 20180153822. In some embodiments, the present disclosure provides a process of encapsulating the polynucleotide or circular RNA in lipid nanoparticles comprising the steps of forming lipids into pre-formed lipid nanoparticles (i.e., formed in the absence of RNA) and then combining the pre-formed lipid nanoparticles with RNA. In some embodiments, the formulation process results in an RNA formulation with higher potency (peptide or protein expression) and higher efficacy (improvement of a biologically relevant endpoint) both in vitro and in vivo with potentially better tolerability as compared to the same RNA formulation prepared without the step of preforming the lipid nanoparticles (e.g., combining the lipids directly with the RNA).

[0578] In some embodiments, transfer vehicles are formulated and/or targeted as described in Shobaki N et al., Int J Nanomedicine 2018; 13:8395-8410. In some embodiments, a transfer vehicle is made up of 3 lipid types. In some embodiments, a transfer vehicle is made up of 4 lipid types. In some embodiments, a transfer vehicle is made up of 5 lipid types. In some embodiments, a transfer vehicle is made up of 6 lipid types.

[0579] For certain cationic lipid nanoparticle formulations of RNA, in order to achieve high encapsulation of RNA, the RNA in buffer (e.g., citrate buffer) has to be heated. In those processes or methods, the heating is required to occur before the formulation process (i.e., heating the separate components) as heating post-formulation (post-formation of nanoparticles) does not increase the encapsulation efficiency of the RNA in the lipid nanoparticles. In contrast, in some embodiments, the order of heating of RNA does not appear to affect the RNA encapsulation percentage. In some embodiments, no heating (i.e. maintaining at ambient temperature) of one or more of the solution comprising the pre formed lipid nanoparticles, the solution comprising the RNA and the mixed solution comprising the lipid nanoparticle encapsulated RNA is required to occur before or after the formulation process.

[0580] RNA may be provided in a solution to be mixed with a lipid solution such that the RNA may be encapsulated in lipid nanoparticles. A suitable RNA solution may be any aqueous solution containing RNA to be encapsulated at various concentrations. For example, a suitable RNA solution may contain an RNA at a concentration of or greater than about 0.01 mg/ml, 0.05 mg/ml, 0.06 mg/ml, 0.07 mg/ml, 0.08 mg/ml, 0.09 mg/ml, 0.1 mg/ml, 0.15 mg/ml, 0.2 mg/ml, 0.3 mg/ml, 0.4 mg/ml, 0.5 mg/ml, 0.6 mg/ml, 0.7 mg/ml, 0.8 mg/ml, 0.9 mg/ml, or 1.0 mg/ml. In some embodiments, a suitable RNA solution may contain an RNA at a concentration in a range from about 0.01-1.0 mg/ml, 0.01-0.9 mg/ml, 0.01-0.8 mg/ml, 0.01-0.7 mg/ml, 0.01-0.6 mg/ml, 0.01-0.5 mg/ml, 0.01-0.4 mg/ml, 0.01-0.3 mg/ml, 0.01-0.2 mg/ml, 0.01-0.1 mg/ml, 0.05-1.0 mg/ml, 0.05-0.9 mg/ml, 0.05-0.8 mg/ml, 0.05-0.7 mg/ml, 0.05-0.6 mg/ml, 0.05-0.5 mg/ml, 0.05-0.4 mg/ml, 0.05-0.3 mg/ml, 0.05-0.2 mg/ml, 0.05-0.1 mg/ml, 0.1-1.0 mg/ml, 0.2-0.9 mg/ml, 0.3-0.8 mg/ml, 0.4-0.7 mg/ml, or 0.5-0.6 mg/ml.

[0581] Typically, a suitable RNA solution may also contain a buffering agent and/or salt. Generally, buffering agents can include HEPES, ammonium sulfate, Tris, sodium bicarbonate, sodium citrate, sodium acetate, potassium phosphate or sodium phosphate In some embodiments, a suitable concentration of the buffering agent may be in a range from about 0.1 mM to 100 mM, 0.5 mM to 90 mM, 1.0 mM to 80 mM, 2 mM to 70 mM, 3 mM to 60 mM, 4 mM to 50 mM, 5 mM to 40 mM, 6 mM to 30 mM, 7 mM to 20 mM, 8 mM to 15 mM, or 9 to 12 mM.

[0582] Exemplary salts can include sodium chloride, magnesium chloride, and potassium chloride. In some embodiments, suitable concentration of salts in an RNA solution may be in a range from about 1 mM to 500 mM, 5 mM to 400 mM, 10 mM to 350 mM, 15 mM to 300 mM, 20 mM to 250 mM, 30 mM to 200 mM, 40 mM to 190 mM, 50 mM to 180 mM, 50 mM to 170 mM, 50 mM to 160 mM, 50 mM to 150 mM, or 50 mM to 100 mM.

[0583] In some embodiments, a suitable RNA solution may have a pH in a range from about 3.5-6.5, 3.5-6.0, 3.5-5.5, 3.5-5.0, 3.5-4.5, 4.0-5.5, 4.0-5.0, 4.0-4.9, 4.0-4.8, 4.0-4.7, 4.0-4.6, or 4.0-4.5.

[0584] Various methods may be used to prepare an RNA solution suitable for the present disclosure. In some embodiments, RNA may be directly dissolved in a buffer solution described herein. In some embodiments, an RNA solution may be generated by mixing an RNA stock solution with a buffer solution prior to mixing with a lipid solution for encapsulation. In some embodiments, an RNA solution may be generated by mixing an RNA stock solution with a buffer solution immediately before mixing with a lipid solution for encapsulation.

[0585] According to the present disclosure, a lipid solution contains a mixture of lipids suitable to form transfer vehicles for encapsulation of RNA. In some embodiments, a suitable lipid solution is ethanol based. For example, a suitable lipid solution may contain a mixture of desired lipids dissolved in pure ethanol (i.e. 100% ethanol). In some embodiments, a suitable lipid solution is isopropyl alcohol based. In some embodiments, a suitable lipid solution is dimethylsulfoxide-based. In some embodiments, a suitable lipid solution is a mixture of suitable solvents including, but not limited to, ethanol, isopropyl alcohol and dimethylsulfoxide.

[0586] A suitable lipid solution may contain a mixture of desired lipids at various concentrations. In some embodiments, a suitable lipid solution may contain a mixture of desired lipids at a total concentration in a range from about 0.1-100 mg/ml, 0.5-90 mg/ml, 1.0-80 mg/ml, 1.0-70 mg/ml, 1.0-60 mg/ml, 1.0-50 mg/ml, 1.0-40 mg/ml, 1.0-30 mg/ml, 1.0-20 mg/ml, 1.0-15 mg/ml, 1.0-10 mg/ml, 1.0-9 mg/ml, 1.0-8 mg/ml, 1.0-7 mg/ml, 1.0-6 mg/ml, or 1.0-5 mg/ml.

[0587] Any desired lipids may be mixed at any ratios suitable for encapsulating RNAs. In some embodiments, a suitable lipid solution contains a mixture of desired lipids including cationic lipids, helper lipids (e.g., non cationic lipids and/or cholesterol lipids) and/or PEGylated lipids. In some embodiments, a suitable lipid solution contains a mixture of desired lipids including one or more cationic lipids, one or more helper lipids (e.g., non cationic lipids and/or cholesterol lipids) and one or more PEGylated lipids.

[0588] In some embodiments, the polynucleotide or circular RNA disclosed herein is formulated using viral vectors. Viral vectors may be derived from a variety of viruses including adenovirus, adeno-associated virus, lentivirus (e.g., HIV, FIV, and EIAV), and herpes virus. Examples of commercially available viral vectors include pSilencer adeno (Ambion, Austin, Tex.) and pLenti6/BLOCK-iT™-DEST (Invitrogen, Carlsbad, Calif.). Selection of viral vectors, methods for expressing the polynucleotide or circular RNA from the vector and methods of delivering the viral vector are within the ordinary skill of one in the art. In some embodiments, the viral vector is a recombinant AAV (rAAV) vector, such as those known in the art (PMID: 30245471, PMID: 33614232).

[0589] The present disclosure also provides a delivery system comprising the polynucleotide or circular RNA disclosed herein. In some embodiments, the delivery system is any one of a liposome, a nanoparticle, a polymer based delivery system or a ligand-conjugate delivery system. In some embodiments, the ligand-conjugate delivery system comprises one or more of an antibody, a peptide, a sugar moiety, or a combination thereof.

[0590] In some embodiments, the delivery system of the present disclosure comprise nanoparticles comprising the polynucleotide or circular RNA disclosed herein.

[0591] In some embodiments, the nanoparticle comprises a polymer-based nanoparticle, a lipid-polymer based nanoparticle, a metal based nanoparticle, a carbon nanotube based nanoparticle, a nanocrystal or a polymeric micelle. In some embodiments, the polymer-based nanoparticle comprises a multiblock copolymer, a deblock copolymer, a polymeric micelle or a hyperbranched macromolecule. In some embodiments, the polymer-based nanoparticle comprises a multiblock copolymer a diblock copolymer. In some embodiments, the polymer-based nanoparticle is pH responsive. In some embodiments, the polymer-based nanoparticle further comprises a buffering component.

[0592] In some embodiments, the delivery system comprises a liposome. Liposomes are spherical vesicles having at least one lipid bilayer, and in some embodiments, an aqueous core. In some embodiments, the lipid bilayer of the liposome may comprise phospholipids. An exemplary but non-limiting example of a phospholipid is phosphatidylcholine, but the lipid bilayer may comprise additional lipids, such as phosphatidylethanolamine. Liposomes may be multilamellar, i.e. consisting of several lamellar phase lipid bilayers, or unilamellar liposomes with a single lipid bilayer. Liposomes can be made in a particular size range that makes them viable targets for phagocytosis. Liposomes can range in size from 20 nm to 100 nm, 100 nm to 400 nm, 1 μM and larger, or 200 nm to 3 μM. Examples of lipidoids and lipid-based formulations are provided in U.S. Pub. No. 20090023673. In some embodiments, the one or more lipids are one or more cationic lipids.

[0593] In some embodiments, the liposome or the nanoparticle of the present disclosure comprises a micelle. A micelle is an aggregate of surfactant molecules. An exemplary micelle comprises an aggregate of amphiphilic macromolecules, polymers or copolymers in aqueous solution, wherein the hydrophilic head portions contact the surrounding solvent, while the hydrophobic tail regions are sequestered in the center of the micelle.

[0594] In some embodiments, the nanoparticle comprises a nanocrystal. Exemplary nanocrystals are crystalline particles with at least one dimension of less than 1000 nanometers, preferably of less than 100 nanometers.

[0595] In some embodiments, the nanoparticle comprises a polymer based nanoparticle. In some embodiments, the polymer comprises a multiblock copolymer, a diblock copolymer, a polymeric micelle or a hyperbranched macromolecule. In some embodiments, the particle comprises one or more cationic polymers. In some embodiments, the cationic polymer is chitosan, protamine, polylysine, polyhistidine, polyarginine or poly(ethylene)imine. In some embodiments, the one or more polymers contain the buffering component, degradable component, hydrophilic component, cleavable bond component or some combination thereof.

[0596] In some embodiments, the nanoparticles or some portion thereof are degradable. In some embodiments, the lipids and/or polymers of the nanoparticles are degradable.

[0597] In some embodiments, any of these delivery systems of the present disclosure can comprise a buffering component. In some embodiments, any of the of the present disclosure can comprise a buffering component and a degradable component. In some embodiments, any of the of the present disclosure can comprise a buffering component and a hydrophilic component. In some embodiments, any of the of the present disclosure can comprise a buffering component and a cleavable bond component. In some embodiments, any of the of the present disclosure can comprise a buffering component, a degradable component and a hydrophilic component. In some embodiments, any of the of the present disclosure can comprise a buffering component, a degradable component and a cleavable bond component. In some embodiments, any of the of the present disclosure can comprise a buffering component, a hydrophilic component and a cleavable bond component. In some embodiments, any of the of the present disclosure can comprise a buffering component, a degradable component, a hydrophilic component and a cleavable bond component. In some embodiments, the particle is composed of one or more polymers that contain any of the aforementioned combinations of components.

[0598] In some embodiments, the delivery system comprises a ligand-conjugate delivery system. In some embodiments, the ligand-conjugate delivery system comprises one or more of an antibody, a peptide, a sugar moiety, lipid or a combination thereof

[0599] In some embodiments, the polynucleotide or circular RNA disclosed herein is conjugated to, complexed to, or encapsulated by the one or more lipids or polymers of the delivery system. In some embodiments, the polynucleotide or circular RNA can be encapsulated in the hollow core of a nanoparticle. Alternatively, or in addition, the polynucleotide or circular RNA can be incorporated into the lipid or polymer based shell of the delivery system, for example via intercalation. Alternatively, or in addition, the polynucleotide or circular RNA can be attached to the surface of the delivery system. In some embodiments, the polynucleotide or circular RNA is conjugated to one or more lipids or polymers of the delivery system, e.g., via covalent attachment.

[0600] In some embodiments, the ligand conjugate delivery system further comprises a targeting agent. In some embodiments, the targeting agent comprises a peptide ligand, a nucleotide ligand, a polysaccharide ligand, a fatty acid ligand, a lipid ligand, a small molecule ligand, an antibody, an antibody fragment, an antibody mimetic or an antibody mimetic fragment.

[0601] In some embodiments, the delivery system of the present disclosure comprises a polymer based delivery system. In some embodiments, polymer based delivery system comprises a blending polymer. In some embodiments, the blending polymer is a copolymer comprising a degradable component and hydrophilic component. In some embodiments, the degradable component of the blending polymer is a polyester, poly(ortho ester), poly(ethylene imine), poly(caprolactone), polyanhydride, poly(acrylic acid), polyglycolide or poly(urethane). In some embodiments, the degradable component of the blending polymer is poly(lactic acid) (PLA) or poly(lactic-co-glycolic acid) (PLGA). In some embodiments, the hydrophilic component of the blending polymer is a polyalkylene glycol or a polyalkylene oxide. In some embodiments, the polyalkylene glycol is polyethylene glycol (PEG). In some embodiments, the polyalkylene oxide is polyethylene oxide (PEO).

[0602] In some embodiments, the delivery system of the present disclosure is a polymer based nanoparticle. Polymer based nanoparticles comprise one or more polymers. In some embodiments, the one or more polymers comprise a polyester, poly(ortho ester), poly(ethylene imine), poly(caprolactone), polyanhydride, poly(acrylic acid), polyglycolide or poly(urethane). In some embodiments, the one or more polymers comprise poly(lactic acid) (PLA) or poly(lactic-co-glycolic acid) (PLGA). In some embodiments, the one or more polymers comprise poly(lactic-co-glycolic acid) (PLGA). In some embodiments, the one or more polymers comprise poly(lactic acid) (PLA). In some embodiments, the one or more polymers comprise polyalkylene glycol or a polyalkylene oxide. In some embodiments, the polyalkylene glycol is polyethylene glycol (PEG) or the polyalkylene oxide is polyethylene oxide (PEO).

[0603] In some embodiments, the polymer-based nanoparticle comprises poly(lactic-co-glycolic acid) PLGA polymers. In some embodiments, the PLGA nanoparticle further comprises a targeting agent, as described herein.

[0604] In some embodiments, the delivery system of the present disclosure is a nanoparticle of average characteristic dimension of less than about 500 nm, 400 nm, 300 nm, 250 nm, 200 nm, 180 nm, 150 nm, 120 nm, 100 nm, 90 nm, 80 nm, 70 nm, 60 nm, 50 nm, 40 nm, 30 nm or 20 nm. In some embodiments, the nanoparticle has an average characteristic dimension of 10 nm, 20 nm, 30 nm, 40 nm, 50 nm, 60 nm, 70 nm, 80 nm, 90 nm, 100 nm, 120 nm, 150 nm, 180 nm, 200 nm, 250 nm or 300 nm. In some embodiments, the nanoparticle has an average characteristic dimension of 10-500 nm, 10-400 nm, 10-300 nm, 10-250 nm, 10-200 nm, 10-150 nm, 10-100 nm, 10-75 nm, 10-50 nm, 50-500 nm, 50-400 nm, 50-300 nm, 50-200 nm, 50-150 nm, 50-100 nm, 50-75 nm, 100-500 nm, 100-400 nm, 100-300 nm, 100-250 nm, 100-200 nm, 100-150 nm, 150-500 nm, 150-400 nm, 150-300 nm, 150-250 nm, 150-200 nm, 200-500 nm, 200-400 nm, 200-300 nm, 200-250 nm, 200-500 nm, 200-400 nm or 200-300 nm.

[0605] In some embodiments, the target cells are deficient in a protein or enzyme of interest. For example, where it is desired to deliver a nucleic acid to a hepatocyte, the hepatocyte represents the target cell. In some embodiments, the compositions of the disclosure transfect the target cells on a discriminatory basis (i.e., do not transfect non-target cells). The compositions of the disclosure may also be prepared to preferentially target a variety of target cells, which include, but are not limited to, hepatocytes, epithelial cells, hematopoietic cells, epithelial cells, endothelial cells, lung cells, bone cells, stem cells, mesenchymal cells, neural cells (e.g., meninges, astrocytes, motor neurons, cells of the dorsal root ganglia and anterior horn motor neurons), photoreceptor cells (e.g., rods and cones), retinal pigmented epithelial cells, secretory cells, cardiac cells, adipocytes, vascular smooth muscle cells, cardiomyocytes, skeletal muscle cells, beta cells, pituitary cells, synovial lining cells, ovarian cells, testicular cells, fibroblasts, B cells, T cells, NK cells, dendritic cells, macrophages, reticulocytes, leukocytes, granulocytes, tumor cells (including tumor cell lines, such as Hela, MCF7, PC3, A549, NCI-H727, and HCT-116), immortalized cells (such as MCF10A, HEK293, HEK293T) and primary cell lines (such as liver stellate cells, HPrEC, FHC).

[0606] The compositions of the disclosure may be prepared to preferentially distribute to target cells in a particular organ as described herein, such as in the heart, lung, kidney, liver, and spleen. In some embodiments, the compositions of the disclosure distribute into the cells of the liver to facilitate the delivery and the subsequent expression of the circular RNA comprised therein by the cells of the liver (e.g., hepatocytes). The targeted cells may function as a biological “reservoir” or “depot” capable of producing, and systemically excreting a functional protein or enzyme. Accordingly, in some embodiments, the transfer vehicle may target hepatocytes and/or preferentially distribute to the cells of the liver upon delivery. In some embodiments, following transfection of the target hepatocytes, the circular RNA loaded in the vehicle are translated and a functional protein product is produced, excreted and systemically distributed. In some embodiments, cells other than hepatocytes (e.g., lung, spleen, heart, ocular, or cells of the central nervous system) can serve as a depot location for protein production.

[0607] In some embodiments, the compositions of the disclosure facilitate a subject's endogenous production of one or more functional proteins and/or enzymes. In some embodiments, the transfer vehicles comprise circular RNA which encode a deficient protein or enzyme. Upon distribution of such compositions to the target tissues and the subsequent transfection of such target cells, the exogenous circular RNA loaded into the transfer vehicle (e.g., a lipid nanoparticle) may be translated in vivo to produce a functional protein or enzyme encoded by the exogenously administered circular RNA (e.g., a protein or enzyme in which the subject is deficient). Accordingly, the compositions of the present disclosure exploit a subject's ability to translate exogenously- or recombinantly-prepared circular RNA to produce an endogenously-translated protein or enzyme, and thereby produce (and where applicable excrete) a functional protein or enzyme. The expressed or translated proteins or enzymes may also be characterized by the in vivo inclusion of native post-translational modifications which may often be absent in recombinantly-prepared proteins or enzymes, thereby further reducing the immunogenicity of the translated protein or enzyme.

[0608] The administration of circular RNA encoding a deficient protein or enzyme avoids the need to deliver the nucleic acids to specific organelles within a target cell. Rather, upon transfection of a target cell and delivery of the nucleic acids to the cytoplasm of the target cell, the circular RNA contents of a transfer vehicle may be translated and a functional protein or enzyme expressed.

[0609] In some embodiments, a circular RNA comprises one or more miRNA binding sites. In some embodiments, a circular RNA comprises one or more miRNA binding sites recognized by miRNA present in one or more non-target cells or non-target cell types (e.g., Kupffer cells) and not present in one or more target cells or target cell types (e.g., hepatocytes). In some embodiments, a circular RNA comprises one or more miRNA binding sites recognized by miRNA present in an increased concentration in one or more non-target cells or non-target cell types (e.g., Kupffer cells) compared to one or more target cells or target cell types (e.g., hepatocytes). miRNAs are thought to function by pairing with complementary sequences within RNA molecules, resulting in gene silencing.

### 8.6. Pharmaceutical Compositions

[0610] In some embodiments, provided herein are compositions (e.g., pharmaceutical compositions) comprising a therapeutic agent provided herein. In some embodiments, the therapeutic agent is a circular RNA polynucleotide provided herein. In some embodiments the therapeutic agent is a vector provided herein. In some embodiments, the therapeutic agent is a cell comprising a circular RNA or vector provided herein. In some embodiments, the composition further comprises a pharmaceutically acceptable carrier. In some embodiments, the compositions provided herein comprise a therapeutic agent provided herein in combination with other pharmaceutically active agents or drugs. In a preferred embodiment, the pharmaceutical composition comprises a cell provided herein or populations thereof.

[0611] With respect to pharmaceutical compositions, the pharmaceutically acceptable carrier can be any of those conventionally used and is limited only by chemico-physical considerations, such as solubility and lack of reactivity with the active agent(s), and by the route of administration. The pharmaceutically acceptable carriers described herein, for example, vehicles, adjuvants, excipients, and diluents, are well-known to those skilled in the art and are readily available to the public. It is preferred that the pharmaceutically acceptable carrier be one which is chemically inert to the therapeutic agent(s) and one which has no detrimental side effects or toxicity under the conditions of use.

[0612] The choice of carrier will be determined in part by the particular therapeutic agent, as well as by the particular method used to administer the therapeutic agent. Accordingly, there are a variety of suitable formulations of the pharmaceutical compositions provided herein.

[0613] In some embodiments, the pharmaceutical composition comprises a preservative. In some embodiments, suitable preservatives may include, for example, methylparaben, propylparaben, sodium benzoate, and benzalkonium chloride. Optionally, a mixture of two or more preservatives may be used. The preservative or mixtures thereof are typically present in an amount of about 0.0001% to about 2% by weight of the total composition.

[0614] In some embodiments, the pharmaceutical composition comprises a buffering agent. In some embodiments, suitable buffering agents may include, for example, citric acid, sodium citrate, phosphoric acid, potassium phosphate, and various other acids and salts. A mixture of two or more buffering agents optionally may be used. The buffering agent or mixtures thereof are typically present in an amount of about 0.001% to about 4% by weight of the total composition.

[0615] In some embodiments, the concentration of therapeutic agent in the pharmaceutical composition can vary, e.g., less than about 1%, or at least about 1%, 2%, 3%, 4%, 5%, 6%, 7%, 8%, 9% 10%, 15%, 20%, 25%, 30%, 35%, 40%, 45%, or about 50% or more by weight, and can be selected primarily by fluid volumes, and viscosities, in accordance with the particular mode of administration selected.

[0616] The following formulations for oral, aerosol, parenteral (e.g., subcutaneous, intravenous, intraarterial, intramuscular, intradermal, intraperitoneal, and intrathecal), and topical administration are merely exemplary and are in no way limiting. More than one route can be used to administer the therapeutic agents provided herein, and in some instances, a particular route can provide a more immediate and more effective response than another route.

[0617] Formulations suitable for oral administration can comprise or consist of (a) liquid solutions, such as an effective amount of the therapeutic agent dissolved in diluents, such as water, saline, or orange juice; (b) capsules, sachets, tablets, lozenges, and troches, each containing a predetermined amount of the active ingredient, as solids or granules; (c) powders; (d) suspensions in an appropriate liquid; and (e) suitable emulsions. Liquid formulations may include diluents, such as water and alcohols, for example, ethanol, benzyl alcohol, and the polyethylene alcohols, either with or without the addition of a pharmaceutically acceptable surfactant. Capsule forms can be of the ordinary hard or soft shelled gelatin type containing, for example, surfactants, lubricants, and inert fillers, such as lactose, sucrose, calcium phosphate, and corn starch. Tablet forms can include one or more of lactose, sucrose, mannitol, corn starch, potato starch, alginic acid, microcrystalline cellulose, acacia, gelatin, guar gum, colloidal silicon dioxide, croscarmellose sodium, talc, magnesium stearate, calcium stearate, zinc stearate, stearic acid, and other excipients, colorants, diluents, buffering agents, disintegrating agents, moistening agents, preservatives, flavoring agents, and other pharmacologically compatible excipients. Lozenge forms can comprise the therapeutic agent with a flavorant, usually sucrose, acacia or tragacanth. Pastilles can comprise the therapeutic agent with an inert base, such as gelatin and glycerin, or sucrose and acacia, emulsions, gels, and the like containing, in addition to, such excipients as are known in the art.

[0618] Formulations suitable for parenteral administration include aqueous and nonaqueous isotonic sterile injection solutions, which can contain antioxidants, buffers, bacteriostats, and solutes that render the formulation isotonic with the blood of the intended recipient, and aqueous and nonaqueous sterile suspensions that can include suspending agents, solubilizers, thickening agents, stabilizers, and preservatives. In some embodiments, the therapeutic agents provided herein can be administered in a physiologically acceptable diluent in a pharmaceutical carrier, such as a sterile liquid or mixture of liquids including water, saline, aqueous dextrose and related sugar solutions, an alcohol such as ethanol or hexadecyl alcohol, a glycol such as propylene glycol or polyethylene glycol, dimethylsulfoxide, glycerol, ketals such as 2,2-dimethyl-1,3-dioxolane-4-methanol, ethers, poly(ethyleneglycol) 400, oils, fatty acids, fatty acid esters or glycerides, or acetylated fatty acid glycerides with or without the addition of a pharmaceutically acceptable surfactant such as a soap or a detergent, suspending agent such as pectin, carbomers, methylcellulose, hydroxypropylmethylcellulose, or carboxymethylcellulose, or emulsifying agents and other pharmaceutical adjuvants.

[0619] Oils, which can be used in parenteral formulations in some embodiments, include petroleum, animal oils, vegetable oils, or synthetic oils. Specific examples of oils include peanut, soybean, sesame, cottonseed, corn, olive, petrolatum, and mineral oil. Suitable fatty acids for use in parenteral formulations include oleic acid, stearic acid, and isostearic acid. Ethyl oleate and isopropyl myristate are examples of suitable fatty acid esters.

[0620] Suitable soaps for use in some embodiments of parenteral formulations include fatty alkali metal, ammonium, and triethanolamine salts, and suitable detergents include (a) cationic detergents such as, for example, dimethyl dialkyl ammonium halides and alkyl pyridinium halides, (b) anionic detergents such as, for example, alkyl, aryl, and olefin sulfonates, alky, olefin, ether, and monoglyceride sulfates, and sulfosuccinates, (c) nonionic detergents such as, for example, fatty amine oxides, fatty acid alkanolamides, and polyoxyethylenepolypropylene copolymers, (d) amphoteric detergents such as, for example, alkyl-b-aminopropionates, and 2-alkyl-imidazoline quaternary ammonium salts, and (e) mixtures thereof.

[0621] In some embodiments, the parenteral formulations will contain, for example, from about 0.5% to about 25% by weight of the therapeutic agent in solution. Preservatives and buffers may be used. In order to minimize or eliminate irritation at the site of injection, such compositions may contain one or more nonionic surfactants having, for example, a hydrophile-lipophile balance (HLB) of from about 12 to about 17. The quantity of surfactant in such formulations will typically range, for example, from about 5% to about 15% by weight. Suitable surfactants include polyethylene glycol, sorbitan fatty acid esters such as sorbitan monooleate, and high molecular weight adducts of ethylene oxide with a hydrophobic base formed by the condensation of propylene oxide with propylene glycol. The parenteral formulations can be presented in unit-dose or multi-dose sealed containers, such as ampoules or vials, and can be stored in a freeze-dried (lyophilized) condition requiring only the addition of a sterile liquid excipient, for example, water, for injections, immediately prior to use. Extemporaneous injection solutions and suspensions can be prepared from sterile powders, granules, and tablets of the kind previously described.

[0622] In some embodiments, injectable formulations are provided herein. The requirements for effective pharmaceutical carriers for injectable compositions are well-known to those of ordinary skill in the art (see, e.g., Pharmaceutics and Pharmacy Practice, J.B. Lippincott Company, Philadelphia, PA, Banker and Chalmers, eds., pages 238-250 (1982), and ASHP Handbook on Injectable Drugs, Toissel, 4th ed, pages 622-630 (1986)).

[0623] In some embodiments, topical formulations are provided herein. Topical formulations, including those that are useful for transdermal drug release, are suitable in the context of certain embodiments provided herein for application to skin. In some embodiments, the therapeutic agent alone or in combination with other suitable components, can be made into aerosol formulations to be administered via inhalation. These aerosol formulations can be placed into pressurized acceptable propellants, such as dichlorodifluoromethane, propane, nitrogen, and the like. They also may be formulated as pharmaceuticals for non-pressured preparations, such as in a nebulizer or an atomizer. Such spray formulations also may be used to spray mucosa.

[0624] In some embodiments, the therapeutic agents provided herein can be formulated as inclusion complexes, such as cyclodextrin inclusion complexes, or liposomes. Liposomes can serve to target the therapeutic agents to a particular tissue. Liposomes also can be used to increase the half-life of the therapeutic agents. Many methods are available for preparing liposomes, as described in, for example, Szoka et al, Ann. Rev. Biophys. Bioeng., 9, 467 (1980) and U.S. Pat. Nos. 4,235,871, 4,501,728, 4,837,028, and 5,019,369.

[0625] In some embodiments, the therapeutic agents provided herein are formulated in time-released, delayed release, or sustained release delivery systems such that the delivery of the composition occurs prior to, and with sufficient time to cause, sensitization of the site to be treated. Such systems can avoid repeated administrations of the therapeutic agent, thereby increasing convenience to the subject and the physician, and may be particularly suitable for certain composition embodiments provided herein. In some embodiments, the compositions of the disclosure are formulated such that they are suitable for extended-release of the circRNA contained therein. Such extended-release compositions may be conveniently administered to a subject at extended dosing intervals. For example, in some embodiments, the compositions of the present disclosure are administered to a subject twice a day, daily or every other day. In some embodiments, the compositions of the present disclosure are administered to a subject twice a week, once a week, every ten days, every two weeks, every three weeks, every four weeks, once a month, every six weeks, every eight weeks, every three months, every four months, every six months, every eight months, every nine months or annually.

[0626] In some embodiments, a protein encoded by a polynucleotide described herein is produced by a target cell for sustained amounts of time. For example, the protein may be produced for more than one hour, more than four, more than six, more than 12, more than 24, more than 48 hours, or more than 72 hours after administration. In some embodiments the therapeutic product is expressed at a peak level about six hours after administration. In some embodiments the expression of the therapeutic product is sustained at least at a therapeutic level. In some embodiments the therapeutic product is expressed at least at a therapeutic level for more than one, more than four, more than six, more than 12, more than 24, more than 48, or more than 72 hours after administration. In some embodiments, the therapeutic product is detectable at a therapeutic level in patient serum or tissue (e.g., liver or lung). In some embodiments, the level of detectable therapeutic product is from continuous expression from the circRNA composition over periods of time of more than one, more than four, more than six, more than 12, more than 24, more than 48, or more than 72 hours after administration.

[0627] In some embodiments, a protein encoded by a polynucleotide described herein is produced at levels above normal physiological levels. The level of protein may be increased as compared to a control. In some embodiments, the control is the baseline physiological level of the therapeutic product in a normal individual or in a population of normal individuals. In some embodiments, the control is the baseline physiological level of the therapeutic product in an individual having a deficiency in the relevant protein or polypeptide or in a population of individuals having a deficiency in the relevant protein or polypeptide. In some embodiments, the control can be the normal level of the relevant protein or polypeptide in the individual to whom the composition is administered. In some embodiments, the control is the expression level of the therapeutic product upon other therapeutic intervention, e.g., upon direct injection of the corresponding therapeutic product, at one or more comparable time points.

[0628] In some embodiments, the levels of a protein encoded by a polynucleotide described herein are detectable at 3 days, 4 days, 5 days, or 1 week or more after administration. Increased levels of secreted protein may be observed in the serum and/or in a tissue (e.g., liver or lung).

[0629] In some embodiments, the method yields a sustained circulation half-life of a protein encoded by a polynucleotide described herein. For example, the protein may be detected for hours or days longer than the half-life observed via subcutaneous injection of the protein or mRNA encoding the protein. In some embodiments, the half-life of the protein is 1 day, 2 days, 3 days, 4 days, 5 days, or 1 week or more.

[0630] Many types of release delivery systems are available and known to those of ordinary skill in the art. They include polymer based systems such as poly (lactide-glycolide), copolyoxalates, polycaprolactones, polyesteramides, polyorthoesters, polyhydroxybutyric acid, and polyanhydrides. Microcapsules of the foregoing polymers containing drugs are described in, for example, U.S. Pat. No. 5,075,109. Delivery systems also include non-polymer systems that are lipids including sterols such as cholesterol, cholesterol esters, and fatty acids or neutral fats such as mono- di- and tri-glycerides; hydrogel release systems; sylastic systems; peptide based systems: wax coatings; compressed tablets using conventional binders and excipients; partially fused implants; and the like. Specific examples include, but are not limited to: (a) erosional systems in which the active composition is contained in a form within a matrix such as those described in U.S. Pat. Nos. 4,452,775, 4,667,014, 4,748,034, and 5,239,660 and (b) diffusional systems in which an active component permeates at a controlled rate from a polymer such as described in U.S. Pat. Nos. 3,832,253 and 3,854,480. In addition, pump-based hardware delivery systems can be used, some of which are adapted for implantation.

[0631] In some embodiments, the therapeutic agent can be conjugated either directly or indirectly through a linking moiety to a targeting moiety. Methods for conjugating therapeutic agents to targeting moieties is known in the art. See, for instance, Wadwa et al, J, Drug Targeting 3:111 (1995) and U.S. Pat. No. 5,087,616.

[0632] In some embodiments, the therapeutic agents provided herein are formulated into a depot form, such that the manner in which the therapeutic agent is released into the body to which it is administered is controlled with respect to time and location within the body (see, for example, U.S. Pat. No. 4,450,150). Depot forms of therapeutic agents can be, for example, an implantable composition comprising the therapeutic agents and a porous or non-porous material, such as a polymer, wherein the therapeutic agents are encapsulated by or diffused throughout the material and/or degradation of the non-porous material. The depot is then implanted into the desired location within the body and the therapeutic agents are released from the implant at a predetermined rate.

### 8.7. Methods of Use

[0633] In some aspects, provided herein is a method of treating and/or preventing a condition, e.g., cancer, comprising introducing pharmaceutical composition provided herein into a subject in need thereof (e.g., a subject with cancer). In some embodiments, the pharmaceutical composition comprises a circular RNA polynucleotide provided herein. In some embodiments, the pharmaceutical composition comprises a vector provided herein. In some embodiments, the pharmaceutical composition comprises a cell (e.g., human cell) comprising a polynucleotide provided herein (e.g., a circular RNA or a vector provided herein).

[0634] Thus, in some embodiments, provided herein are methods of treating and/or preventing a disease in a subject (e.g., mammalian subject, such as a human subject). Without being bound to a particular theory or mechanism, the circular RNA provided herein can be used to express therapeutic proteins for protein replacement therapy.

[0635] In some embodiments, the therapeutic agents provided herein are co-administered with one or more additional therapeutic agents (e.g., in the same pharmaceutical composition or in separate pharmaceutical compositions). In some embodiments, the therapeutic agent provided herein can be administered first and the one or more additional therapeutic agents can be administered second, or vice versa. Alternatively, the therapeutic agent provided herein and the one or more additional therapeutic agents can be administered simultaneously.

[0636] In some embodiments, the therapeutic agent is a cell or population of cells comprising a circular RNA or a vector provided herein that expresses a protein encoded by the circular RNA or vector. In some embodiments, the administered cells are allogeneic to the subject being treated. In some embodiments, the administered cells are autologous to the subject being treated.

[0637] In some embodiments, the subject is a mammal. In some embodiments, the mammal referred to herein can be any mammal, including, but not limited to, mammals of the order Rodentia, such as mice and hamsters, or mammals of the order Logomorpha, such as rabbits. The mammals may be from the order Carnivora, including Felines (cats) and Canines (dogs). The mammals may be from the order Artiodactyla, including Bovines (cows) and Swines (pigs), or of the order Perssodactyla, including Equines (horses). The mammals may be of the order Primates, Ceboids, or Simoids (monkeys) or of the order Anthropoids (humans and apes). Preferably, the mammal is a human.

[0638] Therapeutically effective amounts of RNA polynucleotides (e.g., circular RNAs) can be administered by a number of routes, including parenteral administration, for example, intravenous, intraperitoneal, intramuscular, intrasternal, or intraarticular injection, or infusion.

### 8.7.1. Gene Therapy

[0639] Compositions and methods are described for the administration of a therapeutically effective amount of an RNA polynucleotide or circular RNA disclosed herein to a subject (e.g., a human) to treat a disease or disorder, for example, a disease or disorder in which the therapeutic product is involved in initiation, development, and/or manifestation of the disease or disorder, including a disease or disorder associated with protein misfolding and/or protein degenerative disease and a disease or disorder associated with a genetic mutation. In some embodiments, the RNA polynucleotide or circular RNA described herein comprises an IRES-like sequence, an endogenous IRES sequence or a variant thereof, or a combination thereof. In some embodiments, the IRES-like sequence, the endogenous IRES sequence or a variant thereof, or the combination thereof is optimized, as disclosed herein, for the expression of a therapeutic product. In some embodiments, the RNA polynucleotide or circular RNA provided herein may be used, for example, in a gene therapy. In some embodiments, the RNA polynucleotide or circular RNA described herein may be used in combination with a CRISPR-Cas system, Zinc finger nuclease (ZFN), Transcription Activator-Like Effector Nuclease (TALEN), meganuclease, and Puf for RNA editing.

### 8.7.2. Vaccine

[0640] Compositions and methods are described herein for the administration of a therapeutically effective amount of an RNA polynucleotide or circular RNA disclosed herein to a subject (e.g., a human) to stimulate an immune reaction to an antigen or an agent (e.g., an infectious agent such as pathogen), generate antibodies against the antigen or agent, destroy the antigen or agent, and/or develop an immunological memory of the antigen or agent. In some embodiments, the RNA polynucleotide described herein comprises an IRES-like sequence, an endogenous IRES sequence or a variant thereof, or a combination thereof. In some embodiments, the RNA polynucleotide described herein comprises an expression sequence encoding a therapeutic product. In some embodiments, the IRES-like sequence, the endogenous IRES sequence or a variant thereof, or the combination thereof is optimized, as disclosed herein, for the expression of a therapeutic product in the subject. In some embodiments, the RNA polynucleotide described herein may be used directly for making a vaccine (e.g., an RNA vaccine).

### 8.7.3. Antibody-Based Therapy

[0641] In some embodiments, the therapeutic product is a polypeptide or protein. In some embodiments, the polypeptide or protein resembles a weakened or non-viable form of a disease-causing agent (e.g., pathogen), which can be selected from a microorganism, such as a bacterium, virus, fungus, parasite, or one or more components of such microorganism, such as toxins, proteins (e.g., surface proteins), and/or cell walls. In some embodiments, the therapeutic product is an antigen or agent which can stimulate the body's immune system to recognize the antigen or agent, generate antibodies against the antigen or agent, destroy the antigen or agent, and/or develop an immunological memory of the antigen or agent. In some embodiments, the therapeutic product is an antigen or agent which can induce and/or strengthen vaccine-induced memory and/or enable the immune system to respond rapidly and effectively to the antigen or agent in later encounters.

[0642] In some embodiments, the therapeutic product is derived from an infectious agent or a part, component, and/or product thereof (e.g., cell wall, genomic sequence, membrane, capsid, protein, lipid, glycan, toxin). In some embodiments, the infectious agent is selected from a virus, a bacterium, a fungus, a protozoan, and a helminth. In some embodiments, the infectious agent is selected a virus and a bacterium.

[0643] In some embodiments, the infectious agent is a virus selected from the group consisting of adenovirus; Herpes simplex, type 1; Herpes simplex, type 2; encephalitis virus, papillomavirus; Varicella-zoster virus; Epstein-Barr virus; human cytomegalovirus; human herpes virus, type 8; BK virus; JC virus; Smallpox; polio virus; human bocavirus; Parvovirus B19; human astrovirus; Norwalk virus; coxsackievirus; hepatitis A virus; hepatitis B virus; hepatitis C virus; hepatitis D virus; hepatitis E virus; rhinovirus; severe acute respiratory syndrome (SARS) virus; Yellow Fever virus; Dengue virus; West Nile virus; Rubella virus; Human Immunodeficiency virus (HIV); influenza virus; Guanarito virus; Junin virus; Lassa virus; Machupo virus; Sabia virus; Crimean-Congo hemorrhagic fever virus; Ebola virus; Marburg virus; measles virus; mumps virus; parainfluenza virus; respiratory syncytial virus (RSV); human metapneumovirus; Hendra virus; Nipah virus; rabies virus; Rotavirus; Orbivirus; Coltivirus; Banna virus; human Enterovirus; Hanta virus; West Nile virus; corona virus, SARS-associated coronavirus (SARS-CoV), SARS-CoV-2 virus (COVID-19 associated); Middle East respiratory syndrome corona virus; Japanese encephalitis virus; vesicular exanthernavirus; and eastern equine encephalitis.

[0644] In some embodiments, the infectious agent is a bacterium selected from tuberculosis (Mycobacterium tuberculosis), clindamycin-resistant Clostridium difficile, fluoroquinolon-resistant Clostridium difficile, methicillin-resistant Staphylococcus aureus (MRSA), multidrug-resistant Enterococcus faecalis, multidrug-resistant Enterococcus faecium, multidrug-resistance Pseudomonas aeruginosa, multidrug-resistant Acinetobacter baumannii, and vancomycin-resistant Staphylococcus aureus (VRSA).

[0645] In some embodiments, the infectious agent is associated with humans, non-human primates, or other animals, such as birds, pigs, horses, dogs, cats, rabbits, mice, rats, cows, sheep, goats, and deer.

[0646] As would be appreciated by a skilled artisan, the terms “antibody therapy” or “antibody-based therapy” are used interchangeably herein to refer to methods of treating a disease or disorder in a subject, wherein the methods comprise the administration of one or more antibodies.

[0647] In some embodiments, the RNA polynucleotide described herein comprises an expression sequence encoding a therapeutic product. In some embodiments, the therapeutic product is a polypeptide or protein. In some embodiments, the polypeptide or protein is a therapeutic antibody. In some embodiments, the RNA polynucleotide and compositions comprising the RNA polynucleotide described herein can be used in the manufacturing process of an antibody for use in antibody therapy.

[0648] Exemplary therapeutic antibodies include antibodies used for the treatment of cancer. Non limiting examples of therapeutic antibodies include 131I-tositumomab (Follicular lymphoma, B cell lymphomas, leukemias), 3F8 (Neuroblastoma), 8H9, Abagovomab (Ovarian cancer), Adecatumumab (Prostate and breast cancer), Afutuzumab (Lymphoma), Alacizumab pegol, Alemtuzumab (B-cell chronic lymphocytic leukaemia, T-cell-Lymphoma), Amatuximab, AME-133v (Follicular lymphoma, cancer), AMG 102 (Advanced Renal Cell Carcinoma), Anatumomab mafenatox (Non-small cell lung carcinoma), Apolizumab (Solid Tumors, Leukemia, Non-Hodgkin-Lymphoma, Lymphoma), Bavituximab (Cancer, viral infections), Bectumomab (Non-Hodgkin's lymphoma), Belimumab (Non-Hodgkin lymphoma), Bevacizumab (Colon Cancer, Breast Cancer, Brain and Central Nervous System Tumors, Lung Cancer, Hepatocellular Carcinoma, Kidney Cancer, Breast Cancer, Pancreatic Cancer, Bladder Cancer, Sarcoma, Melanoma, Esophageal Cancer; Stomach Cancer, Metastatic Renal Cell Carcinoma; Kidney Cancer, Glioblastoma, Liver Cancer, Proliferative Diabetic Retinopathy, Macular Degeneration), Bivatuzumab mertansine (Squamous cell carcinoma), Blinatumomab, Brentuximab vedotin (Hematologic cancers), Cantuzumab (Colon Cancer, Gastric Cancer, Pancreatic Cancer, NSCLC), Cantuzumab mertansine (Colorectal cancer), Cantuzumab ravtansine (Cancers), Capromab pendetide (Prostate cancer), Carlumab, Catumaxomab (Ovarian Cancer, Fallopian Tube Neoplasms, Peritoneal Neoplasms), Cetuximab (Metastatic colorectal cancer and head and neck cancer), Citatuzumab bogatox (Ovarian cancer and other solid tumors), Cixutumumab (Solid tumors), Clivatuzumab tetraxetan (Pancreatic cancer), CNTO 328 (B-Cell Non-Hodgkin's Lymphoma, Multiple Myeloma, Castleman's Disease, ovarian cancer), CNTO 95 (Melanoma), Conatumumab, Dacetuzumab (Hematologic cancers), Dalotuzumab, Denosumab (Myeloma, Giant Cell Tumor of Bone, Breast Cancer, Prostate Cancer, Osteoporosis), Detumomab (Lymphoma), Drozitumab, Ecromeximab (Malignant melanoma), Edrecolomab (Colorectal carcinoma), Elotuzumab (Multiple myeloma), Elsilimomab, Enavatuzumab, Ensituximab, Epratuzumab (Autoimmune diseases, Systemic Lupus Erythematosus, Non-Hodgkin-Lymphoma, Leukemia), Ertumaxomab (Breast cancer), Ertumaxomab (Breast Cancer), Etaracizumab (Melanoma, prostate cancer, ovarian cancer), Farletuzumab (Ovarian cancer), FBTA05 (Chronic lymphocytic leukaemia), Ficlatuzumab (Cancer), Figitumumab (Adrenocortical carcinoma, non-small cell lung carcinoma), Flanvotumab (Melanoma), Galiximab (B-cell lymphoma), Galiximab (Non-Hodgkin-Lymphoma), Ganitumab, GC1008 (Advanced Renal Cell Carcinoma; Malignant Melanoma, Pulmonary Fibrosis), Gemtuzumab (Leukemia), Gemtuzumab ozogamicin (Acute myelogenous leukemia), Girentuximab (Clear cell renal cell carcinoma), Glembatumumab vedotin (Melanoma, breast cancer), GS6624 (Idiopathic pulmonary fibrosis and solid tumors), HuC242-DM4 (Colon Cancer, Gastric Cancer, Pancreatic Cancer), HuHMFG1 (Breast Cancer), HuN901-DM1 (Myeloma), Ibritumomab (Relapsed or refractory low-grade, follicular, or transformed B-cell non-Hodgkin's lymphoma (NHL)), Icrucumab, ID09C3 (Non-Hodgkin-Lymphoma), Indatuximab ravtansine, Inotuzumab ozogamicin, Intetumumab (Solid tumors (Prostate cancer, melanoma)), Ipilimumab (Sarcoma, Melanoma, Lung cancer, Ovarian Cancer leucemia, Lymphoma, Brain and Central Nervous System Tumors, Testicular Cancer, Prostate Cancer, Pancreatic Cancer, Breast Cancer), Iratumumab (Hodgkin's lymphoma), Labetuzumab (Colorectal cancer), Lexatumumab, Lintuzumab, Lorvotuzumab mertansine, Lucatumumab (Multiple myeloma, non-Hodgkin's lymphoma, Hodgkin's lymphoma), Lumiliximab (Chronic lymphocytic leukemia), Mapatumumab (Colon Cancer, Myeloma), Matuzumab (Lung Cancer, Cervical Cancer, Esophageal Cancer), MDX-060 (Hodgkin-Lymphoma, Lymphoma), MEDI 522 (Solid Tumors, Leukemia, Lymphoma, Small Intestine Cancer, Melanoma), Mitumomab (Small cell lung carcinoma), Mogamulizumab, MORab-003 (Ovarian Cancer, Fallopian Tube Cancer, Peritoneal Cancer), MORab-009 (Pancreatic Cancer, Mesothelioma, Ovarian Cancer, Non-Small Cell Lung Cancer, Fallopian Tube Cancer, Peritoneal Cavity Cancer), Moxetumomab pasudotox, MT103 (Non-Hodgkin-Lymphoma), Nacolomab tafenatox (Colorectal cancer), Naptumomab estafenatox (Non-small cell lung carcinoma, renal cell carcinoma), Narnatumab, Necitumumab (Non-small cell lung carcinoma), Nimotuzumab (Squamous cell carcinoma, head and neck cancer, nasopharyngeal cancer, glioma), Nimotuzumab (Squamous cell carcinomas, Glioma, Solid Tumors, Lung Cancer), Olaratumab, Onartuzumab (Cancer), Oportuzumab monatox, Oregovomab (Ovarian cancer), Oregovomab (Ovarian Cancer, Fallopian Tube Cancer, Peritoneal Cavity Cancer), PAM4 (Pancreatic Cancer), Panitumumab (Colon Cancer, Lung Cancer, Breast Cancer; Bladder Cancer; Ovarian Cancer), Patritumab, Pemtumomab, Pertuzumab (Breast Cancer, Ovarian Cancer, Lung Cancer, Prostate Cancer), Pritumumab (Brain cancer), Racotumomab, Radretumab, Ramucirumab (Solid tumors), Rilotumumab (Solid tumors), Rituximab (Urticaria, Rheumatoid Arthritis, Ulcerative Colitis, Chronic Focal Encephalitis, Non-Hodgkin-Lymphoma, Lymphoma, Chronic Lymphocytic Leukemia), Robatumumab, Samalizumab, SGN-30 (Hodgkin-Lymphoma, Lymphoma), SGN-40 (Non-Hodgkin-Lymphoma, Myeloma, Leukemia, Chronic Lymphocytic Leukemia), Sibrotuzumab, Siltuximab, Tabalumab (B-cell cancers), Tacatuzumab tetraxetan, Taplitumomab paptox, Tenatumomab, Teprotumumab (Hematologic tumors), TGN1412 (Chronic lymphocytic leukemia, rheumatoid arthritis), Ticilimumab (=tremelimumab), Tigatuzumab, TNX-650 (Hodgkin's lymphoma), Tositumomab (Follicular lymphoma, B cell lymphomas, Leukemias, Myeloma), Trastuzumab (Breast Cancer, Endometrial Cancer, Solid Tumors), TRBS07 (Melanoma), Tremelimumab, TRU-016 (Chronic lymphocytic leukemia), TRU-016 (Non-Hodgkin lymphoma), Tucotuzumab celmoleukin, Ublituximab, Urelumab, Veltuzumab (Non-Hodgkin's lymphoma), Veltuzumab (IMMU-106) (Non-Hodgkin's lymphoma), Volociximab (Renal Cell Carcinoma, Pancreatic Cancer, Melanoma), Votumumab (Colorectal tumors), WX-G250 (Renal Cell Carcinoma), Zalutumumab (Head and Neck Cancer, Squamous Cell Cancer), and Zanolimumab (T-Cell-Lymphoma).

[0649] Exemplary therapeutic antibodies include antibodies used for the treatment of immune disorders. Non limiting examples of therapeutic antibodies include Efalizumab (Psoriasis), Epratuzumab (Autoimmune diseases, Systemic Lupus Erythematosus, Non-Hodgkin-Lymphoma, Leukemia), Etrolizumab (inflammatory bowel disease), Fontolizumab (Crohn's disease), Ixekizumab (autoimmune diseases), Mepolizumab (Hypereosinophilie-Syndrom, Asthma, Eosinophilic Gastroenteritis, Churg-Strauss Syndrome, Eosinophilic Esophagitis), Milatuzumab (multiple myeloma and other hematological malignancies), Pooled immunoglobulins (Primary immunodeficiencies), Priliximab (Crohn's disease, multiple sclerosis), Rituximab (Urticaria, Rheumatoid Arthritis, Ulcerative Colitis, Chronic Focal Encephalitis, Non-Hodgkin-Lymphoma, Lymphoma, Chronic Lymphocytic Leukemia), Rontalizumab (systemic lupus erythematosus), Ruplizumab (rheumatic diseases), Sarilumab (rheumatoid arthritis, ankylosing spondylitis), Vedolizumab (Crohn's disease, ulcerative colitis), Visilizumab (Crohn's disease, ulcerative colitis), Reslizumab (inflammations of the airways, skin and gastrointestinal tract), Adalimumab (Rheumatoid arthritis, Crohn's disease, Ankylosing spondylitis, Psoriatic arthritis), Aselizumab (severely injured patients), Atinumab (treatment of neurologic systems), Atlizumab (rheumatoid arthritis, systemic juvenile idiopathic arthritis), Bertilimumab (severe allergic disorders), Besilesomab (inflammatory lesions and metastases), BMS-945429, ALD518 (cancer and rheumatoid arthritis), Briakinumab (psoriasis, rheumatoid arthritis, inflammatory bowel diseases, multiple sclerosis), Brodalumab (inflammatory diseases), Canakinumab (rheumatoid arthritis), Canakinumab (cryopyrin-associated periodic syndromes (CAPS), rheumatoid arthritis, chronic obstructive pulmonary disease), Certolizumab pegol (Crohn's disease), Erlizumab (heart attack, stroke, traumatic shock), Fezakinumab (rheumatoid arthritis, psoriasis), Golimumab (rheumatoid arthritis, psoriatic arthritis, ankylosing spondylitis), Gomiliximab (allergic asthma), Infliximab (Rheumatoid arthritis, Crohn's disease, ankylosing spondylitis, psoriatic arthritis, plaque psoriasis, Morbus Bechterew, Colitis ulcerosa), Mavrilimumab (rheumatoid arthritis), Natalizumab (Multiple sclerosis), Ocrelizumab (multiple sclerosis, rheumatoid arthritis, lupus erythematosus, hematological cancer), Odulimomab (prevention of organ transplant rejections, immunological diseases), Ofatumumab (Chronic lymphocytic leukemia, follicular non-Hodgkin's lymphoma, B cell lymphoma, rheumatoid arthritis, relapsing remitting multiple sclerosis, Lymphoma, B-Cell Chronic Lymphocytic Leukemia), Ozoralizumab (inflammation), Pexelizumab (reduction of side effects of cardiac surgery), Rovelizumab (haemorrhagic shock), SBI-087 (Rheumatoid arthritis), SBI-087 (Systemic lupus erythematosus), Secukinumab (uveitis, rheumatoid arthritis psoriasis), Sirukumab (rheumatoid arthritis), Talizumab (allergic reaction), Tocilizumab (rheumatoid arthritis, systemic juvenile idiopathic arthritis, Castleman's disease), Toralizumab (rheumatoid arthritis, lupus nephritis), TRU-015 (Rheumatoid arthritis), TRU-016 (Autoimmune disease and inflammation), Ustekinumab (multiple sclerosis, psoriasis, psoriatic arthritis), Ustekinumab (IL-12/IL-23 blocker) (Plaque-Psoriasis, psoriatic arthritis, multiple sclerosis, sarcoidosis, the latter versus), Vepalimomab (inflammation), Zolimomab aritox (systemic lupus erythematosus, graft-versus-host disease), Sifalimumab (SLE, dermatomyositis, polymyositis), Lumiliximab (Allergies), and Rho(D) Immune Globulin (Rhesus disease); or are selected from antibodies used for the treatment of infectious diseases, e.g. Afelimomab (sepsis), CR6261 (infectious disease/influenza A), Edobacomab (sepsis caused by gram-negative bacteria), Efungumab (invasive Candida infection), Exbivirumab (hepatitis B), Felvizumab (respiratory syncytial virus infection), Foravirumab (rabies (prophylaxis)), Ibalizumab (HIV infection), Libivirumab (hepatitis B), Motavizumab (respiratory syncytial virus (prevention)), Nebacumab (sepsis), Tuvirumab (chronic hepatitis B), Urtoxazumab (diarrhoea caused by E. coli), Bavituximab (diverse viral infections), Pagibaximab (sepsis (e.g. Staphylococcus)), Palivizumab (prevention of respiratory syncytial virus infection in high-risk paediatric patients), Panobacumab (Pseudomonas aeruginosa infection), PRO 140 (HIV infection), Rafivirumab (rabies (prophylaxis)), Raxibacumab (anthrax (prophylaxis and treatment)), Regavirumab (cytomegalovirus infection), Sevirumab (cytomegalovirus infection), Suvizumab (viral infections), and Tefibazumab (Staphylococcus aureus infection).

[0650] Exemplary therapeutic antibodies include antibodies used for the treatment of blood disorders. Non limiting examples of therapeutic antibodies include Abciximab (percutaneous coronary intervention), Atorolimumab (hemolytic disease of the newborn), Eculizumab (Paroxysmal nocturnal haemoglobinuria), Mepolizumab (Hypereosinophilie-Syndrom, Asthma, Eosinophilic Gastroenteritis, Churg-Strauss Syndrome, Eosinophilic Esophagitis), and Milatuzumab (multiple myeloma and other hematological malignancies).

[0651] Exemplary therapeutic antibodies include antibodies used for immunoregulation. Non-limiting examples of therapeutic antibodies include Antithymocyte globulin (Acute kidney transplant rejection, aplastic anaemia), Basiliximab (Prophylaxis against allograft rejection in renal transplant patients receiving an immunosuppressive regimen including cyclosporine and corticosteroids), Cedelizumab (prevention of organ transplant rejections, treatment of autoimmune diseases), Daclizumab (Prophylaxis against acute allograft rejection in patients receiving renal transplants, Multiple Sclerosis), Gavilimomab (graft versus host disease), Inolimomab (graft versus host disease), Muromonab-CD3 (prevention of organ transplant rejections), Muromonab-CD3 (Acute renal allograft rejection or steroid-resistant cardiac or hepatic allograft rejection), Odulimomab (prevention of organ transplant rejections, immunological diseases), and Siplizumab (psoriasis, graft-versus-host disease (prevention)).

[0652] Exemplary therapeutic antibodies include antibodies used for treatment of diabetes, Alzheimer's disease or asthma. Non-limiting examples of therapeutic antibodies include Gevokizumab (diabetes), Otelixizumab (diabetes mellitus type 1), and Teplizumab (diabetes mellitus type 1); Bapineuzumab, Crenezumab, Gantenerumab, Ponezumab, R1450, and Solanezumab (Alzheimer's disease); Benralizumab, Enokizumab, Keliximab, Lebrikizumab, Omalizumab, Oxelumab, Pascolizumab, and Tralokinumab (asthma).

### 8.7.4. Cell Therapy

[0653] As would be appreciated a skilled artisan, the term “cell therapy” or “cellular therapy” are used interchangeably herein to refer to methods of treating a disease, disorder and/or injury in a subject wherein the method comprises the administration of one or more cells (i.e. a plurality of cells) to the subject.

[0654] Non-limiting examples of diseases, disorder and/or injuries that can be treated with cell therapy include cancer (both hematological cancers and solid tumors), compromised bone marrow (bone marrow that has been comprised and/or damaged due to disease, infection, radiation and/or chemotherapy), infection, spinal cord injuries, diabetes, spinal cord injuries, type 1 diabetes, Parkinson's disease, amyotrophic lateral sclerosis, Alzheimer's disease, heart disease, stroke, burns, osteoarthritis, autoimmune diseases, infectious diseases, amyloidosis, acute leukemia, acute myeloid leukemia, Amegakaryocytosis or congenital thrombocytopenia, Aplastic anemia or refractory anemia, chronic lymphocytic leukemia, familial erythrophagocytic lymphohistiocytosis, myelodysplastic syndrome of another myelodysplastic disorder, osteopetrosis, paroxysmal nocturnal hemoglobinuria, Wiskott-Aldrich syndrome, Hodgkin lymphoma, non-Hodgkin lymphoma, multiple myeloma and tissue/organ damage.

[0655] As would be appreciated by a skilled artisan, cell therapy encompasses allogeneic cell therapies (wherein the cells that are transplanted into the subject are derived from a human donor that is not the subject), autologous cell therapies (wherein the cells that are transplanted into the subject are derived from the subject) and xenogeneic cell therapies (wherein the cells that are transplanted are derived from a species other than human).

[0656] As would be appreciated by a skilled artisan, cell therapy can encompass the administration of several different cell types, including, but not limited to, blood cells, embryonic stem cells, neural stem cells, mesenchymal stem cells, hematopoietic stem cells, cadiomyocytes, islet cells, chondrocytes, T cells, tumor-infiltrating lymphocytes, engineered T cells, Natural Killer (NK) cells, chimeric antigen receptor (CAR)-T cells, red blood cells, white blood cells, platelets, pluripotent stem cells, fibroblasts, keratinocytes, hepatocytes, dendritic cells, macrophages or any combination thereof.

[0657] In some embodiments, the cell therapy is a CAR-T cell therapy. Non-limiting examples of an autologous CAR-T cell based therapy include brexucabtagene autoleucel (TECARTUS®), axicabtagene ciloleucel (YESCARTA®), idecabtagene vicleucel (ABECMA®), lisocabtagene maraleucel (BREYANZI®), tisagenlecleucel (KYMRIAH®), Descartes-08 and Descartes-11 from Cartesian Therapeutics, CTL110 from Novartis, P-BMCA-101 from Poseida Therapeutics, and AUTO4 from Autolus Limited. Non-limiting examples of an allogeneic CAR-T cell based therapy include UCARTCS from Cellectis, PBCAR19B and PBCAR269A from Precision Biosciences, FT819 from Fate Therapeutics, and CYAD-211 from Clyad Oncology.

[0658] In some embodiments, the cell therapy is a dendritic cell (DC) vaccine therapy. The term “dendritic cell vaccine”, as used herein, refers to a vaccine comprising dendritic cells which are loaded with the antigens against which an immune reaction is desired.

[0659] As would be appreciated by the skilled artisan, the term “dendritic cell (DC)” refers to an antigen presenting cell capable of sensitizing HLA-restricted T cells. DCs include DCs derived from bone marrow hematopoietic cells such as plasmacytoid dendritic cells, myeloid dendritic cells, Langerhans cells and interdigitating cells; and follicular DCs. Dendritic cells may be recognized by function, or by phenotype, particularly by cell surface phenotype. These cells are characterized by their distinctive morphology having veil-like projections on the cell surface, intermediate to high levels of surface HLA-class II expression and ability to present antigen to T cells, particularly to naive T cells (See Steinman R, et al., Ann. Rev. Immunol. 1991; 9:271-196). Typically, cell surface phenotype of DCs include CD1a+, CD4+, CD86+, or HLA-DR. The term DCs encompasses both immature and mature DCs.

[0660] Typically, in the generation of an anti-cancer DC-based vaccine, DCs are expanded ex vivo and contacted with a cancer antigen or a cancer cell lysate to thereby induce presentation of the cancer antigen (see e.g. Nestle, F. et al. (1998) Nature Medicine 4: 328-332). Alternatively, promoting presentation of a cancer antigen by a DC comprises transfecting the DC with a DNA, cDNA, an mRNA a RNA polynucleotide described herein or any combination thereof, that encodes for a cancer antigen. Non-limiting examples of cancer antigens include MAGE-AI, MAGE-A2, MAGE-A3, MAGE-A4, MAGE-AS, MAGE-A6, MAGE-A7, MAGE-AS, MAGE-A9, MAGE-AIO, MAGE-A1 1, MAGE-A12, GAGE-I, GAGE-2, GAGE-3, GAGE-4, GAGE-5, GAGE-6, GAGE-7, GAGE-8, BAGE-1, RAGE-1, LB33/MUM-1, PRAME, NAG, MAGE-Xp2 (MAGE-B2), MAGE-Xp3 (MAGE-B3), MAGE-Xp4 (MAGE-B4), MAGE-C1/CT7, MAGE-C2, NY-ESO-1, LAGE-1, SSX-1, SSX-2(HOM-MEL-40), SSX-3, SSX-4, SSX-5, SCP-1 and XAGE, melanocyte differentiation antigens, p53, ras, CEA, MUCI, PMSA, PSA, tyrosinase, Melan-A, MART-I, gplOO, gp75, alphaactinin-4, Bcr-Abl fusion protein, Casp-8, beta-catenin, cdc27, cdk4, cdkn2a, coa-1, dek-can fusion protein, EF2, ETV6-AML1 fusion protein, LDLR-fucosyltransferase AS fusion protein, HLA-A2, HLA-A11, hsp70-2, KIAA0205, Mart2, Mum-2, and 3, neo-PAP, myosin class I, OS-9, pml-RAR alpha fusion protein, PTPRK, K-ras, N-ras, Triosephosphate isomerase, GnTV, Herv-K-mel, NA-88, SP17, and TRP2-Int2, (MART-I), E2A-PRL, H4-RET, IGH-IGK, MYL-RAR, Epstein Barr virus antigens, EBNA, human papillomavirus (HPV) antigens E6 and E7, TSP-180, MAGE-4, MAGE-5, MAGE-6, p185erbB2, plSOerbB-3, c-met, nm-23H1, PSA, TAG-72-4, CA 19-9, CA 72-4, CAM 17.1, NuMa, K-ras, alpha.-fetoprotein, 13HCG, BCA225, BTAA, CA 125, CA 15-3 (CA 27.29\BCAA), CA 195, CA 242, CA-50, CAM43, CD68\KP1, CO-029, FGF-5, 0250, Ga733 (EpCAM), HTgp-175, M344, MA-50, MG7-Ag, MOV18, NB\170K, NYCO-I, RCASI, SDCCAG16, TA-90 (Mac-2 binding protein\cyclophilin C-associated protein), TAAL6, TAG72, TLP, TPS, tyrosinase related proteins, TRP-1, or TRP-2 and tumor derived heat shock proteins.

[0661] As would be appreciated by the skilled artisan, pluralities of cells that are administered as part of a cell therapy can comprise a single cell type or two or more different cell types. Cell therapy that comprises the administration of two or more cell types can be referred to as “multicellular therapy”.

[0662] As would be appreciated by the skilled artisan, cells that are transplanted into a subject as part of a cell therapy can be modified or unmodified. Accordingly, in some embodiments, the nucleic acid molecules and compositions comprising nucleic acid molecules described herein can be used in the modification of cells that are to be transplanted into a subject as part of a cell therapy. In a non-limiting example, the nucleic acid molecules of the present disclosure can be introduced into the cells that are to be transplanted as part of a cell therapy using standard methods known in the art or methods described herein. In some embodiments, the nucleic acid molecules and compositions comprising nucleic acid molecules described herein can be used in the manufacturing process of the cell therapy.

### 8.8. Articles of Manufacture or Kits

[0663] An article of manufacture or a kit is provided comprising RNA polynucleotides is also provided herein. The article of manufacture or kit can further comprise a package insert comprising instructions for using the genetically engineered immune cells to treat or delay progression of cancer in an individual or to enhance immune function of an individual having cancer. Any of the RNA polynucleotides described herein may be included in the article of manufacture or kits. Suitable containers include, for example, bottles, vials, bags and syringes. The container may be formed from a variety of materials such as glass, plastic (such as polyvinyl chloride or poly olefin), or metal alloy (such as stainless steel or hastelloy). In some embodiments, the container holds the formulation and the label on, or associated with, the container may indicate directions for use. The article of manufacture or kit may further include other materials desirable from a commercial and user standpoint, including other buffers, diluents, filters, needles, syringes, and package inserts with instructions for use. In some embodiments, the article of manufacture further includes one or more of another agent (e.g., a chemotherapeutic agent, and anti-neoplastic agent). Suitable containers for the one or more agent include, for example, bottles, vials, bags and syringes.

### 8.9. Assays

[0664] Various IRES-like sequences, endogenous IRES sequences or variants thereof, or combinations thereof, may be tested for their ability to attracts a eukaryotic ribosomal translation initiation complex and/or promote translation initiation. The assays below are described for IRES-like sequences but can be performed analogously for endogenous IRES sequences or variants thereof, combinations of IRES-like sequences and endogenous IRES sequences or variants thereof, combinations of one or more IRES-like sequences, or combinations of endogenous IRES sequences or variants thereof.

### 8.9.1. Reference Value

[0665] A reference value is useful to select an IRES-like sequence, endogenous IRES sequence or a variant thereof, or a combination thereof that is able to attract a eukaryotic ribosomal translation initiation complex and/or promote translation initiation, as compared to sequences which are minimally able to, or are unable to or are considered unable to, attract a eukaryotic ribosomal translation initiation complex and/or promote translation initiation. In some embodiments, the reference value is characteristic of the absence of the target therapeutic product expression. In some embodiments, the reference value is the mean of the output value of the total input population, e.g., the mean of the expression level of the therapeutic product, of all the input IRES-like sequences, endogenous IRES sequences or variants thereof, or combinations thereof. In some embodiments, the reference value is the average output value of the total input population, e.g., the average of the expression level of the therapeutic product, of all the input IRES-like sequences, endogenous IRES sequences or variants thereof, or combinations thereof. In some embodiment, the reference value is about 95%, about 90%, about 85%, about 80%, about 75%, about 70%, about 65%, about 60%, about 55%, about 50%, about 45%, about 40%, about 35%, about 30%, about 25%, about 20%, about 15%, about 10%, about 9%, about 8%, about 7%, about 6%, about 5%, about 4%, about 3%, about 2%, about 1%, about 0.9%, about 0.8%, about 0.7%, about 0.6%, about 0.5%, about 0.4%, about 0.3%, about 0.2%, or about 0.1% of the highest output value of the total input population, e.g., the highest expression level of the therapeutic product, of all the input IRES-like sequences, endogenous IRES sequences or variants thereof, or combinations thereof. In some embodiments, the reference value is the average output value of the total input population, e.g., the average of the expression level of the therapeutic product, of all the input IRES-like sequences, endogenous IRES sequences or variants thereof, or combinations thereof. In some embodiment, the reference value is about 50%, about 45%, about 40%, about 35%, about 30%, about 25%, about 20%, about 15%, about 10%, about 9%, about 8%, about 7%, about 6%, about 5%, about 4%, about 3%, about 2%, about 1%, about 0.9%, about 0.8%, about 0.7%, about 0.6%, about 0.5%, about 0.4%, about 0.3%, about 0.2%, or about 0.10% of the highest output value of the total input population, e.g., the highest expression level of the therapeutic product, of all the input IRES-like sequences, endogenous IRES sequences or variants thereof, or combinations thereof. In some embodiment, the reference value is at least about 95%, about 90%, about 85%, about 80%, about 75%, about 70%, about 65%, about 60%, about 55%, about 50%, about 45%, about 40%, about 35%, about 30%, about 25%, about 20%, about 15%, about 10%, about 9%, about 8%, about 7%, about 6%, about 5%, about 4%, about 3%, about 2%, about 1%, about 0.9%, about 0.8%, about 0.7%, about 0.6%, about 0.5%, about 0.4%, about 0.3%, about 0.2%, or about 0.1% higher than the lowest output value of the total input population, e.g., the lowest expression level of the therapeutic product, of all the input IRES-like sequences, endogenous IRES sequences or variants thereof, or combinations thereof. In some embodiments, the reference value is the average output value of the total input population, e.g., the average of the expression level of the therapeutic product, of all the input IRES-like sequences, endogenous IRES sequences or variants thereof, or combinations thereof. In some embodiment, the reference value is at least about 95%, about 90%, about 85%, about 80%, about 75%, about 70%, about 65%, about 60%, about 55%, or about 50% higher the lowest output value of the total input population, e.g., the lowest expression level of the therapeutic product, of all the input IRES-like sequences, endogenous IRES sequences or variants thereof, or combinations thereof. In some embodiment, the reference value is greater than or equal to 0. In some embodiments, the reference value is greater than 0. In some embodiment, the reference value is at least about 99.995% higher the lowest output value of the total input population, e.g., the lowest expression level of the therapeutic product, of all the input IRES-like sequences, endogenous IRES sequences or variants thereof, or combinations thereof. In some embodiment, the reference value is at least about 99.999%, about 99.998%, about 99.997%, about 99.996% or about 99.995% higher the lowest output value of the total input population, e.g., the lowest expression level of the therapeutic product, of all the input IRES-like sequences, endogenous IRES sequences or variants thereof, or combinations thereof. In some embodiment, the reference value is at least about 99.9999%, about 99.9998%, about 99.9997%, about 99.9996% or about 99.9995% higher the lowest output value of the total input population, e.g., the lowest expression level of the therapeutic product, of all the input IRES-like sequences, endogenous IRES sequences or variants thereof, or combinations thereof. In some embodiment, the reference value is at least about 99.99999%, about 99.99998%, about 99.99997%, about 99.99996% or about 99.99995% higher the lowest output value of the total input population, e.g., the lowest expression level of the therapeutic product, of all the input IRES-like sequences, endogenous IRES sequences or variants thereof, or combinations thereof. In some embodiment, the reference value is at least about 99.999999%, about 99.999998%, about 99.999997%, about 99.999996% or about 99.999995% higher the lowest output value of the total input population, e.g., the lowest expression level of the therapeutic product, of all the input IRES-like sequences, endogenous IRES sequences or variants thereof, or combinations thereof. In some embodiment, the reference value is at least about 99.9999999%, about 99.9999998%, about 99.9999997%, about 99.9999996% or about 99.9999995% higher the lowest output value of the total input population, e.g., the lowest expression level of the therapeutic product, of all the input IRES-like sequences, endogenous IRES sequences or variants thereof, or combinations thereof.

### 8.9.2. Assessing Therapeutic Product Expression Levels and/or Activities

[0666] The level of a therapeutic product, such as a polypeptide, a protein, an antibody, or an enzyme, can be determined by any method known in the art or described herein. In some embodiments, the level of a therapeutic product, such as a polypeptide, a protein, an antibody, or an enzyme, can be determined by assessing (e.g., quantifying) transcribed RNA produced from the IRES-like sequences, endogenous IRES sequences or variants thereof, or combinations thereof of the present disclosure in a sample from a subject, by using, e.g., Northern blotting, PCR analysis, real time PCR analysis, or any other technique known in the art or described herein. In some embodiments, the level of a therapeutic product, such as a polypeptide, a protein, an antibody, or an enzyme can be determined by assessing (e.g., quantifying) the mRNA produced from the IRES-like sequences, endogenous IRES sequences or variants thereof, or combinations thereof of the present disclosure in a sample from a subject. In some embodiments, the level of a therapeutic product, such as a polypeptide, a protein, an antibody, or an enzyme, can be determined by assessing (e.g., quantifying) the level of polypeptide or protein expression of the therapeutic product produced from the IRES-like sequences, endogenous IRES sequences or variants thereof, or combinations thereof of the present disclosure in a sample from a subject, by using, e.g., immunohistochemical analysis, Western blotting, ELISA, immunoprecipitation, flow cytometry analysis, or any other technique known in the art or described herein.

[0667] In some embodiments, samples may be collected from various tissues or organs of the subject where a therapeutic product is produced or suspected of being produced. In some embodiments, samples may be collected from one or more tissues selected from epithelia tissue (e.g., skin tissue, lining of the GI tract), connective tissue (e.g., blood, fat, bone, tendon), muscle tissue (e.g., cardiac muscle, smooth muscle, skeletal muscle), and nervous tissue (e.g., brain tissue, tissue from the spinal cord, tissue from nerves). In some embodiments, samples may be collected from one or more organs selected from head, neck, brain, eye, ear, nose, tongue, throat, heart, lung, pancreas, spleen, thyroid, esophagus, stomach, intestine, liver, gall bladder, colon, bladder, kidney, breast, ovary, uterus, testicle, cervix, skin, blood, and lymph node and a part thereof. In some embodiments, the subject is any subject described herein. In some embodiments, the subject is a human. In some embodiments, the subject is a human suffering from a disease or disorder, for example, a disease or disorder in which the therapeutic product is involved in initiation, development, and/or manifestation of the disease or disorder.

[0668] In some embodiments, samples may be a primary cell, a cell line derived from a primary cell, an immortalized cell, or a mixture thereof.

[0669] In some embodiments, the level of a therapeutic product is measured directly, i.e., without a tag or a marker. In some embodiments, the level of a therapeutic product is measured indirectly, i.e., through a tag or a marker. In some embodiments, a therapeutic product is fused with a tag or a marker. Any tag or marker known in the art to measure gene/protein expression may be used. In some embodiments, the tag or marker is selected from a fluorescent protein (e.g., GFP, BFP, YFP, RFP), an enzyme (e.g., luciferase), an HA tag, a His tag, a FLAG tag, a Myc tag, and a combination thereof.

[0670] In particular embodiments, the level of the protein is determined by a method capable of quantifying the amount of the therapeutic product present in a tissue sample of a patient (e.g., in human serum), and/or capable of detecting the correction of the level of protein following treatment with the RNA polynucleotide, the polypeptide, the DNA vector, or the cell described herein.

[0671] In some embodiments, the level of the therapeutic product in a tissue sample is determined by assessing (e.g., quantifying) protein expression of the therapeutic product in the sample using ELISA, Western blotting, or luciferase assay.

### 8.9.3. Screening Assays

[0672] Various IRES-like sequences, endogenous IRES sequences or variants thereof, or combinations thereof, may be tested for their ability to attracts a eukaryotic ribosomal translation initiation complex and/or promote translation initiation. The assays below are described for IRES-like sequences but can be performed analogously for endogenous IRES sequence or a variant thereof, a combination of IRES-like sequence and endogenous IRES sequence or a variant thereof, a sequence comprising one or more IRES-like sequences or endogenous IRES sequences or variants thereof.

### 8.9.3.1. Expression Level

[0673] For example, the effect of an IRES-like sequence, endogenous IRES sequence or a variant thereof, or a combination thereof disclosed herein on the expression of level of a therapeutic product may be assessed. In some embodiments, the effect may be assessed through in vitro translation of an RNA polynucleotide or circular RNA comprising an IRES-like sequence, endogenous IRES sequence or a variant thereof, or a combination thereof disclosed herein in a cell free system. In some embodiments, the effect may be assessed through transfection/transformation of a cell with an RNA polynucleotide or circular RNA comprising an IRES-like sequence, endogenous IRES sequence or a variant thereof, or a combination thereof disclosed herein and expression of the RNA polynucleotide or circular RNA. The expression level of the therapeutic product may be assessed according to any method known in the art and/or described herein, e.g., immunohistochemical analysis, Western blotting, ELISA, immunoprecipitation, and flow cytometry analysis.

[0674] In some embodiments, IRES-like sequences, endogenous IRES sequences or variants thereof, or combinations thereof identified based on their effect on the expression of level of a therapeutic product (e.g., an expression marker such as a fluorescence protein or a luciferase) may be further assessed for their ability to promote, facilitate, or regulate (e.g., increase or decrease) the therapeutic product expression in vitro. In some embodiments, IRES-like sequences, endogenous IRES sequences or variants thereof, or combinations thereof may be further assessed in animal models for their ability to promote, facilitate, or regulate (e.g., increase or decrease) the therapeutic product expression in vivo. In some embodiments, IRES-like sequences, endogenous IRES sequences or variants thereof, or combinations thereof may be further assessed in animal models for their ability to promote, facilitate, or regulate (e.g., increase or decrease) the therapeutic product expression in a specific tissue or organ.

[0675] Non-limiting illustrative examples of the various assays or methods are provided below.

### In Vitro Transfection and Translation

[0676] A desirable amount of a circular RNA can be transfected into cells (e.g., prokaryotic cells or eukaryotic cells) using a transfecting agent, such as Lipofectamine 3000 (Invitrogen). In vitro translation of a desirable amount of a circular RNA may be performed in a cell free lysate. The cell lysate may be collected to analyze the protein expression after incubation.

### Western Blot

[0677] Cells transfected with an RNA polynucleotide or circular RNA comprising an IRES-like sequence, endogenous IRES sequence or a variant thereof, or a combination thereof of the present disclosure according to the methods or techniques described herein may be lysed. The total cell lysates are resolved, e.g., through electrophoresis, such as with 4-20% ExpressPlus™ PAGE Gel (GeneScript®). The proteins are transferred to a membrane (e.g., PVDF membrane) to be probed with an antibody against the protein. A secondary antibody binding to the first antibody may be used to stain the membrane for detection. Positive controls such as such as known Gtx, Rsv, CrPV, PSIV, or TSV IRES may be used.

### Luciferase Assay

[0678] Cells transfected with an RNA polynucleotide or circular RNA comprising an IRES-like sequence, endogenous IRES sequence or a variant thereof, or a combination thereof of the present disclosure according to the methods or techniques described herein may be lysed. A luciferase reporter assay, such as the dual-luciferase reporter assay system from Promega™, is used to generate the luminescent signal. The luminescence is measured, for example, by Bio-Tek synergy H1.

### Flow Cytometry

[0679] Cells transfected with an RNA polynucleotide or circular RNA comprising an IRES-like sequence, endogenous IRES sequence or a variant thereof, or a combination thereof of the present disclosure according to the methods or techniques described herein are collected for flow cytometry, for example, by using BD FACSAria II. To select the singlets, SSC-A vs FSC-A may be used to select 293T cells. Two round selections of singlets may be used by SSC-W vs FSC-H and FSC-W vs FSC-H. FITC-A vs FSC-A may be used to select GFP-positive cells, and the expression level may determined by the level of fluorescence.

### ELISA

[0680] ELISA may be carried out according to Bull World Health Organ. 54(2):129-39 (1976) (PMID: 798633).

[0681] Optionally, the therapeutic product may be derivatized with other compounds and have derivatizing groups that facilitate isolation of the compounds. Non-limiting examples of derivatizing groups include biotin, fluorescein, digoxygenin, green fluorescent protein, isotopes, polyhistidine, magnetic beads, glutathione S transferase (GST), photoactivatable crosslinkers, or any combinations thereof. Optionally, the expression level of the therapeutic product may be assessed by measuring the level of the derivatizing groups.

### 8.9.3.2. Biological Activities

[0682] The biological activities or functions of an IRES-like sequence, endogenous IRES sequence or a variant thereof, or a combination thereof disclosed herein may be assessed according to any method known in the art and/or described herein, e.g., in vivo imaging and PET. For example, the biological activity may include inhibition of tumor growth, and may be assessed in animal models, such as cell-line-derived xenograft (CDX) and patient-derived xenograft (PDX) model.

[0683] Non-limiting illustrative examples of the various assays or methods are provided below.

### In Vivo Imaging

[0684] For detection of in vivo expression, female BALB/c mice aged 6-8 weeks may be used for administration with an RNA polynucleotide or circular RNA comprising an IRES-like sequence, endogenous IRES sequence or a variant thereof, or a combination thereof of the present disclosure (e.g., a luciferase-encoding circular RNA). The administration may be via intramuscular (i.m.), subcutaneous (s.c.), or intranasal (i.n.) routes. At certain times post administration, animals are injected intraperitoneally (i.p.) with luciferase substrate. Fluorescence signals are collected, for example, by IVIS Spectrum instrument (PerkinElmer). For in vitro imaging, tissues including brain, heart, liver, spleen, lung, kidney, and muscle from the animals are collected immediately, and fluorescence signals of each tissue are measured, for example, by IVIS imager. The fluorescence signals in regions of interest (ROIs) are quantified, e.g., by using Living Image 3.0.

### PET

[0685] Mouse tumor xenografts are formed with tumor cell lines. PET scans are performed before and after administration of the animals with an RNA polynucleotide or circular RNA comprising an IRES-like sequence, endogenous IRES sequence or a variant thereof, or a combination thereof of the present disclosure. For example, PET scans may be performed 1 h after a 3.7- to 7.4-MBq administration. A second PET scan may be performed at suitable time points after further administrations.

[0686] For example, the assay can be used to access the competitive binding ability of the expressed therapeutic product in a biological system.

[0687] For example, the assay can be used to access the enzymatic ability of the expressed therapeutic product in a biological system.

[0688] For example, the assay can be used to access the inhibition activities of the expressed therapeutic product in a biological system.

[0689] Assays which are performed in cell-free systems, such as may be derived with purified or semi-purified proteins, are often preferred as “primary” screens in that they can be generated to permit rapid development and relatively easy detection of an alteration in a molecular target which is mediated by a test compound. Moreover, the effects of cellular toxicity or bioavailability of the test compound can be generally ignored in the in vitro system, the assay instead being focused primarily on the effect of the therapeutic product on the molecular target.

### 8.9.4. Secondary Structure Analysis

[0690] Stem-loop structure is a type of an RNA secondary structure, which can be determined by any suitable polynucleotide folding algorithm. The energy associated with the secondary structure of a nucleic acid (e.g., an RNA) is free energy which incorporates both enthalpy and entropic contributions. The size of helix and different base-pairing techniques are used to minimize the free energy of RNA secondary structure. This energy is referred to as Gibbs free energy, or AG (kcal/mol). Different techniques have been proposed, but “minimum free energy” is most widely used to predict the RNA secondary structure. Specifically, the structure having lowest Gibbs free energy provides more stability to the secondary structure and the stabilization of RNA molecules and the minimization of free energy can be obtained by stacking of base pairs in a helix. Loops and budges put the negative effect on the stability of the structure. In general, stability and accuracy of the secondary structure of a nucleic acid (e.g., an RNA) are measured based on the amount of free energy releases while forming the correct base pairs. As the negativity in free energy released by a structure increases, it gives a more stable sequence of base pairs. (Zuker M (1994) Prediction of RNS secondary structure by energy minimization, Volume 25 of COMPUTER ANALYSIS OF SEQUENCE DATA: PART II, Grifn A M, Grifn H G (eds), Chapter 23, CRC Press, Inc., Totowa, NJ, pp 267-294.) Various algorithms have been developed to calculate the MFE value of a nucleic acid, which can be either a global algorithm or a local (sliding window) algorithm. In some embodiments, the MFE value of a nucleic acid (e.g., an RNA) is computed using a global algorithm. In some embodiments, the MFE value of a nucleic acid (e.g., an RNA) is computed using a local (sliding window) algorithm.

[0691] Among the various algorithms available in the art, Dynamic programming (DP) is as an approach that can be used to compute the MFE value of RNA molecules in the absence of pseudoknots. The benchmarking of RNA folding algorithm named mFold is dependent on DP. (Zuker and Stiegler, Nucleic Acids Res. 9 (1981), 133-148.) Nature inspired optimization algorithms such as evolutionary algorithms (EAs), genetic algorithms (GAs) can also be used. Particle swarm optimization (PSO) techniques have also been adopted. Exemplary available algorithms for MFE value calculation include, for example, RnaPredict, RNAfold, HSRNAFold, SetPSO, HelixPSO, SARNAPredict, ACRNA, PSOfold, efold, and EAMD. RNAfold is an online folding algorithm developed by the Institute for Theoretical Chemistry at the University of Vienna using a centroid structure prediction algorithm (e.g., AR Gruber et al., 2008, Cell 106 (1): 23-24; and PA Carr and GM Church, 2009, Nature Biotechnology 27 (12): 1151-62). RnaPredict applies selection, recombination, and mutation operators on to file the minimal energy structure. HSRNAFold algorithm uses the musical techniques for better searching results. SetPSO is based on PSO algorithm to solve the energy minimization problem in RNA. The HelixPSO algorithm works similar to RNAPredict algorithm and takes set of helices to obtain a secondary structure from RNA sequence. SARNAPredict is also a permutation-based algorithm like HelixPSO, which uses the method of cooling a substance of Simulated Annealing algorithm with a simple thermodynamic model. ACRNA uses ant colony optimizer and PSOfold are both PSO based algorithms. Additionally, environmental adaption method for dynamic environment (EAMD) is a meta-heuristic optimization algorithm. (e.g., Wiese and Glen (2003) Biosystems, 72(1):29-41; Clote (2005) J Comput Biol 12(1):83-101; Geem et al. (2001) Simulation 76(2):60-68; Gruber et al., 2008, Cell 106 (1): 23-24; Carr and Church, 2009, Nature Biotechnology 27(12): 1151-62; Mohsen et al (2010) An optimization algorithm based on harmony search for RNA secondary structure prediction. In: Geem Z W (eds) RECENT ADVANCES IN HARMONY SEARCH ALGORITHM. STUDIES IN COMPUTATIONAL INTELLIGENCE, vol 270. Springer, Berlin, Heidelberg; Geis and Middendorf (2011) Int J Intell Comput Cybern 4(2):160-186; Liu et al. (2011) Chem Res Chin Univ 27(1):108-112; Yu et al. (2010) J Bionic Eng 7(4):382-389; Wu et al. (2011) A fuzzy adaptive particle swarm optimization for “RNA secondary structure” prediction. In: Information science and technology (ICIST), 2011 international conference on 2011 Mar. 26, IEEE, pp 1390-1393.) Additional algorithms can be found in U.S. Provisional Application No. 61/836,080, which is incorporated herein by reference.

[0692] In some embodiments, whether an RNA can function as a group II intron is determined using an online predicting tool or a predicting software. An example of such online predicting tool is the online web server “http://webapps2.ucalgary.ca/” created by Zimmerly lab, University of Calgary.

### 8.9.5. In Vitro Self-Splicing Assay

[0693] Various in vitro assays are available in the art to test and confirm the self-splicing activity of a given cRNAzyme. The procedure below is described for illustrative purposes. The DNA sequence encoding a subject cRNAzyme is into a proper vector, e.g., pUC57. Vectors are amplified and purified, and linearized using BamHI for in vitro transcription. Radiolabeled transcripts are prepared using T7 RNA polymerase, 5 mM MgCl2, 40 mM Tris-HCl pH 7.5, 0.05% Triton X-100, 10 pCi [α-31P]UTP (3000 Ci mmol−1), 0.5 mM UTP, and 1 mM other NTPs. In vitro transcription reactions are done for 1 h at 37° C. followed by purification of the RNA product on a denaturing 4% (19:1) polyacrylamide, 8M urea, 1×TBE gel. Radiolabeled RNA product is refolded in 40 mM Tris-HCl pH 7.5 through heating at 90° C. for 1 min followed by incubation in 40 mM Tris-HCl pH 7.5, 10 mM MgCl2 for 15 min. To initiate self-splicing, RNA was mixed with an equal volume of 2X splicing buffer (2M NH4Cl, 40 mM Tris-HCl pH 7.5). Reactions are quenched by mixing with an equal volume of 80% formamide, 100 mM EDTA. Splicing products are resolved using denaturing 4% (19:1) polyacrylamide, 8M urea, 1x TBE gels. All splicing assays are done in triplicate.

[0694] The self-splicing products can be quantified using any methods known in the art. For example, splicing gels are exposed to storage phosphor screens and splicing products are quantitated using Quantity Analysis Software. Unequal loading can be accounted for by normalizing to an internal control RNA. Band intensity is determined by dividing the background subtracted intensity of each band by the number of uridine residues in the RNA sequence corresponding to the band. All band intensities are then normalized to an unspliced control to give fractional values of input RNA.

### 8.9.6. Electron Microscopy (EM)

[0695] EM is an effective tool to visualize the structure of a cRNAzyme. An exemplary EM procedure is provided below to determine the structure of a group 11 intron.

[0696] For negative staining EM, 4 μl of the solution containing the cRNAzyme is applied to a glow-discharged holey carbon grid that is pre-coated with a thin layer of continuous carbon film over the holes. After 1 min, the grid is washed consecutively with three droplets of 2% (w/v) uranyl acetate solution for total of 30 sec. After another 1 min, the residual stain is blotted off and the grid was air-dried. The EM data for the negatively-stained specimen is collected on an FEI Tecnai-12 transmission electron microscope, equipped with a LaB6 filament and operated at 120 kV acceleration voltage. Images are collected at a nominal magnification of 68,000×, using a total dose of about 20 e−/Å2 and defocus value ranging from −1.0 to −1.5 μm on a Gatan Ultrascan4000 CCD camera, with a pixel size of 1.65 Å on the object scale. Total of 66 tilt-pair images of the specimen at 0° and 500 are recorded manually for the random-conical tilt 3D reconstruction.

[0697] For cryo-EM, frozen-hydrated specimens are prepared using the FEI Vitrobot Mark IV plunger. 4 μl of the diluted sample is placed on a glow-discharged holey carbon grid (Quantifoil Cu-Rh R1.2/1.3) pre-coated with continuous carbon film (with −2 nm thickness). The excess of solution from the grid is blotted for 2.0 s at 100% humidity at 22° C. before the grid is flash frozen into liquid ethane slush cooled at liquid nitrogen temperature. Cryo-EM data are collected on an FEI Titan Krios electron microscope, equipped with a Gatan K2 Summit direct-electron counting camera. The microscope is operated at 300 kV and images of the specimen are recorded with a defocus range of −1.2 to −3 μm at a calibrated magnification in super resolution mode of the K2 camera, yielding a pixel size of about 0.6 Å on the object scale. 1000 to 5000 movie stacks, each containing 32 sub-frames, are recorded using the semi-automated low-dose acquisition program UCSF-Image4, with an electron dose rate of 6.25 electrons per A2 per second and total exposure time of 8 seconds.

### 8.10. Sequences

[0698] Table 1. Exemplary Pentamer (5-mer) Sequences and Enrichment Scores
[0699] Tables 2-96. Exemplary IRES-like Sequences and Numerical Scores
[0700] Table 97. Exemplary Sequences Comprising IRES-like Sequences and Natural IRES Sequences
[0701] Tables 98-100. Exemplary Natural IRES Sequences
[0702] Table 101. Exemplary Nucleic Acid Sequences of Target Products
[0703] Table 102. Exemplary Amino Acid Sequences of Target Products
[0704] Table 103. Exemplary E1 Sequences
[0705] Table 104. Exemplary E2 Sequences
[0706] Table 105. Exemplary Group II Intron Sequences
[0707] Table 106. Exemplary 3′ Intron Fragment Sequences
[0708] Table 107. Exemplary 5′ Intron Fragment Sequences
[0709] Table 108. Exemplary Self-splicing ribozyme cRNAzyme comprising IRES-like Sequences for Circular Constructs
[0710] Table 109. Exemplary 5′ Homology Arm and 3′ Homology Arm Sequences
[0711] Table 110. Exemplary IRES-like Sequences and Numerical Scores
[0712] Table 111. Exemplary circular RNA for luciferase reporter assay
[0713] Table 112. Exemplary IRES-like Sequences and Numerical Scores
[0714] Table 113. Foldback primer

Lengthy table referenced here
US20250320519A1-20251016-T00001
Please refer to the end of the specification for access instructions.

Lengthy table referenced here
US20250320519A1-20251016-T00002
Please refer to the end of the specification for access instructions.

Lengthy table referenced here
US20250320519A1-20251016-T00003
Please refer to the end of the specification for access instructions.

Lengthy table referenced here
US20250320519A1-20251016-T00004
Please refer to the end of the specification for access instructions.

Lengthy table referenced here
US20250320519A1-20251016-T00005
Please refer to the end of the specification for access instructions.

Lengthy table referenced here
US20250320519A1-20251016-T00006
Please refer to the end of the specification for access instructions.

Lengthy table referenced here
US20250320519A1-20251016-T00007
Please refer to the end of the specification for access instructions.

Lengthy table referenced here
US20250320519A1-20251016-T00008
Please refer to the end of the specification for access instructions.

Lengthy table referenced here
US20250320519A1-20251016-T00009
Please refer to the end of the specification for access instructions.

Lengthy table referenced here
US20250320519A1-20251016-T00010
Please refer to the end of the specification for access instructions.

Lengthy table referenced here
US20250320519A1-20251016-T00011
Please refer to the end of the specification for access instructions.

Lengthy table referenced here
US20250320519A1-20251016-T00012
Please refer to the end of the specification for access instructions.

Lengthy table referenced here
US20250320519A1-20251016-T00013
Please refer to the end of the specification for access instructions.

Lengthy table referenced here
US20250320519A1-20251016-T00014
Please refer to the end of the specification for access instructions.

Lengthy table referenced here
US20250320519A1-20251016-T00015
Please refer to the end of the specification for access instructions.

Lengthy table referenced here
US20250320519A1-20251016-T00016
Please refer to the end of the specification for access instructions.

Lengthy table referenced here
US20250320519A1-20251016-T00017
Please refer to the end of the specification for access instructions.

Lengthy table referenced here
US20250320519A1-20251016-T00018
Please refer to the end of the specification for access instructions.

Lengthy table referenced here
US20250320519A1-20251016-T00019
Please refer to the end of the specification for access instructions.

Lengthy table referenced here
US20250320519A1-20251016-T00020
Please refer to the end of the specification for access instructions.

Lengthy table referenced here
US20250320519A1-20251016-T00021
Please refer to the end of the specification for access instructions.

Lengthy table referenced here
US20250320519A1-20251016-T00022
Please refer to the end of the specification for access instructions.

Lengthy table referenced here
US20250320519A1-20251016-T00023
Please refer to the end of the specification for access instructions.

Lengthy table referenced here
US20250320519A1-20251016-T00024
Please refer to the end of the specification for access instructions.

Lengthy table referenced here
US20250320519A1-20251016-T00025
Please refer to the end of the specification for access instructions.

Lengthy table referenced here
US20250320519A1-20251016-T00026
Please refer to the end of the specification for access instructions.

Lengthy table referenced here
US20250320519A1-20251016-T00027
Please refer to the end of the specification for access instructions.

Lengthy table referenced here
US20250320519A1-20251016-T00028
Please refer to the end of the specification for access instructions.

Lengthy table referenced here
US20250320519A1-20251016-T00029
Please refer to the end of the specification for access instructions.

Lengthy table referenced here
US20250320519A1-20251016-T00030
Please refer to the end of the specification for access instructions.

Lengthy table referenced here
US20250320519A1-20251016-T00031
Please refer to the end of the specification for access instructions.

Lengthy table referenced here
US20250320519A1-20251016-T00032
Please refer to the end of the specification for access instructions.

Lengthy table referenced here
US20250320519A1-20251016-T00033
Please refer to the end of the specification for access instructions.

Lengthy table referenced here
US20250320519A1-20251016-T00034
Please refer to the end of the specification for access instructions.

Lengthy table referenced here
US20250320519A1-20251016-T00035
Please refer to the end of the specification for access instructions.

Lengthy table referenced here
US20250320519A1-20251016-T00036
Please refer to the end of the specification for access instructions.

Lengthy table referenced here
US20250320519A1-20251016-T00037
Please refer to the end of the specification for access instructions.

Lengthy table referenced here
US20250320519A1-20251016-T00038
Please refer to the end of the specification for access instructions.

Lengthy table referenced here
US20250320519A1-20251016-T00039
Please refer to the end of the specification for access instructions.

Lengthy table referenced here
US20250320519A1-20251016-T00040
Please refer to the end of the specification for access instructions.

Lengthy table referenced here
US20250320519A1-20251016-T00041
Please refer to the end of the specification for access instructions.

Lengthy table referenced here
US20250320519A1-20251016-T00042
Please refer to the end of the specification for access instructions.

Lengthy table referenced here
US20250320519A1-20251016-T00043
Please refer to the end of the specification for access instructions.

Lengthy table referenced here
US20250320519A1-20251016-T00044
Please refer to the end of the specification for access instructions.

Lengthy table referenced here
US20250320519A1-20251016-T00045
Please refer to the end of the specification for access instructions.

Lengthy table referenced here
US20250320519A1-20251016-T00046
Please refer to the end of the specification for access instructions.

Lengthy table referenced here
US20250320519A1-20251016-T00047
Please refer to the end of the specification for access instructions.

Lengthy table referenced here
US20250320519A1-20251016-T00048
Please refer to the end of the specification for access instructions.

Lengthy table referenced here
US20250320519A1-20251016-T00049
Please refer to the end of the specification for access instructions.

Lengthy table referenced here
US20250320519A1-20251016-T00050
Please refer to the end of the specification for access instructions.

Lengthy table referenced here
US20250320519A1-20251016-T00051
Please refer to the end of the specification for access instructions.

Lengthy table referenced here
US20250320519A1-20251016-T00052
Please refer to the end of the specification for access instructions.

Lengthy table referenced here
US20250320519A1-20251016-T00053
Please refer to the end of the specification for access instructions.

Lengthy table referenced here
US20250320519A1-20251016-T00054
Please refer to the end of the specification for access instructions.

Lengthy table referenced here
US20250320519A1-20251016-T00055
Please refer to the end of the specification for access instructions.

Lengthy table referenced here
US20250320519A1-20251016-T00056
Please refer to the end of the specification for access instructions.

Lengthy table referenced here
US20250320519A1-20251016-T00057
Please refer to the end of the specification for access instructions.

Lengthy table referenced here
US20250320519A1-20251016-T00058
Please refer to the end of the specification for access instructions.

Lengthy table referenced here
US20250320519A1-20251016-T00059
Please refer to the end of the specification for access instructions.

Lengthy table referenced here
US20250320519A1-20251016-T00060
Please refer to the end of the specification for access instructions.

Lengthy table referenced here
US20250320519A1-20251016-T00061
Please refer to the end of the specification for access instructions.

Lengthy table referenced here
US20250320519A1-20251016-T00062
Please refer to the end of the specification for access instructions.

Lengthy table referenced here
US20250320519A1-20251016-T00063
Please refer to the end of the specification for access instructions.

Lengthy table referenced here
US20250320519A1-20251016-T00064
Please refer to the end of the specification for access instructions.

Lengthy table referenced here
US20250320519A1-20251016-T00065
Please refer to the end of the specification for access instructions.

Lengthy table referenced here
US20250320519A1-20251016-T00066
Please refer to the end of the specification for access instructions.

Lengthy table referenced here
US20250320519A1-20251016-T00067
Please refer to the end of the specification for access instructions.

Lengthy table referenced here
US20250320519A1-20251016-T00068
Please refer to the end of the specification for access instructions.

Lengthy table referenced here
US20250320519A1-20251016-T00069
Please refer to the end of the specification for access instructions.

Lengthy table referenced here
US20250320519A1-20251016-T00070
Please refer to the end of the specification for access instructions.

Lengthy table referenced here
US20250320519A1-20251016-T00071
Please refer to the end of the specification for access instructions.

Lengthy table referenced here
US20250320519A1-20251016-T00072
Please refer to the end of the specification for access instructions.

Lengthy table referenced here
US20250320519A1-20251016-T00073
Please refer to the end of the specification for access instructions.

Lengthy table referenced here
US20250320519A1-20251016-T00074
Please refer to the end of the specification for access instructions.

Lengthy table referenced here
US20250320519A1-20251016-T00075
Please refer to the end of the specification for access instructions.

Lengthy table referenced here
US20250320519A1-20251016-T00076
Please refer to the end of the specification for access instructions.

Lengthy table referenced here
US20250320519A1-20251016-T00077
Please refer to the end of the specification for access instructions.

Lengthy table referenced here
US20250320519A1-20251016-T00078
Please refer to the end of the specification for access instructions.

Lengthy table referenced here
US20250320519A1-20251016-T00079
Please refer to the end of the specification for access instructions.

Lengthy table referenced here
US20250320519A1-20251016-T00080
Please refer to the end of the specification for access instructions.

Lengthy table referenced here
US20250320519A1-20251016-T00081
Please refer to the end of the specification for access instructions.

Lengthy table referenced here
US20250320519A1-20251016-T00082
Please refer to the end of the specification for access instructions.

Lengthy table referenced here
US20250320519A1-20251016-T00083
Please refer to the end of the specification for access instructions.

Lengthy table referenced here
US20250320519A1-20251016-T00084
Please refer to the end of the specification for access instructions.

Lengthy table referenced here
US20250320519A1-20251016-T00085
Please refer to the end of the specification for access instructions.

Lengthy table referenced here
US20250320519A1-20251016-T00086
Please refer to the end of the specification for access instructions.

Lengthy table referenced here
US20250320519A1-20251016-T00087
Please refer to the end of the specification for access instructions.

Lengthy table referenced here
US20250320519A1-20251016-T00088
Please refer to the end of the specification for access instructions.

Lengthy table referenced here
US20250320519A1-20251016-T00089
Please refer to the end of the specification for access instructions.

Lengthy table referenced here
US20250320519A1-20251016-T00090
Please refer to the end of the specification for access instructions.

Lengthy table referenced here
US20250320519A1-20251016-T00091
Please refer to the end of the specification for access instructions.

Lengthy table referenced here
US20250320519A1-20251016-T00092
Please refer to the end of the specification for access instructions.

Lengthy table referenced here
US20250320519A1-20251016-T00093
Please refer to the end of the specification for access instructions.

Lengthy table referenced here
US20250320519A1-20251016-T00094
Please refer to the end of the specification for access instructions.

Lengthy table referenced here
US20250320519A1-20251016-T00095
Please refer to the end of the specification for access instructions.

Lengthy table referenced here
US20250320519A1-20251016-T00096
Please refer to the end of the specification for access instructions.

Lengthy table referenced here
US20250320519A1-20251016-T00097
Please refer to the end of the specification for access instructions.

Lengthy table referenced here
US20250320519A1-20251016-T00098
Please refer to the end of the specification for access instructions.

Lengthy table referenced here
US20250320519A1-20251016-T00099
Please refer to the end of the specification for access instructions.

Lengthy table referenced here
US20250320519A1-20251016-T00100
Please refer to the end of the specification for access instructions.

Lengthy table referenced here
US20250320519A1-20251016-T00101
Please refer to the end of the specification for access instructions.

Lengthy table referenced here
US20250320519A1-20251016-T00102
Please refer to the end of the specification for access instructions.

Lengthy table referenced here
US20250320519A1-20251016-T00103
Please refer to the end of the specification for access instructions.

Lengthy table referenced here
US20250320519A1-20251016-T00104
Please refer to the end of the specification for access instructions.

Lengthy table referenced here
US20250320519A1-20251016-T00105
Please refer to the end of the specification for access instructions.

Lengthy table referenced here
US20250320519A1-20251016-T00106
Please refer to the end of the specification for access instructions.

Lengthy table referenced here
US20250320519A1-20251016-T00107
Please refer to the end of the specification for access instructions.

Lengthy table referenced here
US20250320519A1-20251016-T00108
Please refer to the end of the specification for access instructions.

Lengthy table referenced here
US20250320519A1-20251016-T00109
Please refer to the end of the specification for access instructions.

Lengthy table referenced here
US20250320519A1-20251016-T00110
Please refer to the end of the specification for access instructions.

Lengthy table referenced here
US20250320519A1-20251016-T00111
Please refer to the end of the specification for access instructions.

Lengthy table referenced here
US20250320519A1-20251016-T00112
Please refer to the end of the specification for access instructions.

Lengthy table referenced here
US20250320519A1-20251016-T00113
Please refer to the end of the specification for access instructions.

### 8.11. Examples

### 8.11.1. Example 1—Method of Identifying IRES-Like Sequences

[0715] Based on the unique circular RNA reporter gene system of the present invention (the circular RNA reporter gene can be expressed under the control of the translation initiation element to produce green fluorescent protein), a set of libraries containing millions of different sequences were constructed, and different cell populations were transfected and screened by flow cytometry (negative: no green fluorescence, positive: green fluorescence with different intensities). Amplicon sequencing on collected different cell populations was performed. The sequence information contained in negative and different positive cells was analyzed in combination with computational biology analysis. Sequence features of different lengths from these sequence information was extracted. Based on these negative and positive sequence features, and through anti-neural network learning, translation initiation element modules of non-viral origin were generated.

[0716] The translation initiation element modules and modular combination elements were inserted into circular RNA expression vectors, and the activity of translation initiation elements was detected by cell transfection and western blot. The high-throughput screening system based on circular RNA separated cell populations with different green fluorescence intensities (positive) and cell populations without fluorescence (negative). The results are shown in FIG. 12A. The results show that the circular RNA system can express green fluorescent protein and be used for screening. At the same time, the system can isolate cell populations with different fluorescence intensities, indicating that different inserted sequences in the library have a differential effect on the translation initiation of circular RNA.

[0717] Computational biology analysis was conducted using the amplicon sequencing data of different cell populations with different green fluorescence intensities (positive) and cell populations without fluorescence (negative).

[0718] An exemplary RNA polynucleotide query sequence was generated using the method as described above (e.g., 12-mer nucleotide sequence) (FIG. 1). Overlapping polynucleotide fragment sequences within the polynucleotide query sequence were generated (e.g., pentamers 1-8). An enrichment score for each polynucleotide fragment sequence was generated (e.g., z-scores of pentamers 1-8) according to the following system of equations:

$$\begin{matrix}Z - Score = \frac{{f}_{1} - {f}_{2}}{\sqrt{( \frac{1}{{N}_{1}} + \frac{1}{{N}_{2}} ) P ( 1 - P )}} \\ P = \begin{matrix}{N}_{1} {f}_{1} - {N}_{2} {f}_{2} \\ {N}_{1} \vert {N}_{2}\end{matrix}\end{matrix}$$

wherein f₁ is the frequency of a certain sequence in a population with positive fluorescence intensities (i.e., the first population), f₂ is the frequency of the same sequence in population without fluorescence (i.e., the second population), N₁ is the size of population with positive fluorescence intensities (i.e., the first population), and N₂ is the size of population without fluorescence (i.e., the second population).

[0719] A numerical score for the polynucleotide query sequence was then generated by summing the enrichment scores of each polynucleotide fragment sequence (e.g., sum of Z-score values). The polynucleotide query sequence was identified as an IRES-like sequence when the numerical score for the polynucleotide query sequence was above a determined threshold.

[0720] The numerical scores were determined for polynucleotide query sequences that were 6-100 nucleotides in length (Tables 2-96, 110 and 112).

### 8.11.2. Example 2—IRES-Like Sequence-Based Vectors

[0721] Coding sequences of an expression protein with IRES-like sequence selected from Tables 101 and 102 were designed and used to construct circRNA vectors. RNAs were in vitro transcribed (“IVT”) from the XbaI digested linearized plasmid DNA template using T7 RiboMAX™ Large-Scale RNA Production System (Promega™, P1320) in the presence of unmodified NTPs. After DNase I treatment, the RNA products were column purified with RNA Clean and Concentrator Kit (ZYMO research, R1013) to remove excess NTP and other salt in IVT buffer, as well as the possible small RNA fragments generated during IVT. In some experiments, the purified RNA was further circularized in a new circularization buffer. The RNAs were first heated to 75° C. for 5 min and quickly cooled down to 45° C., after which a buffer including indicated magnesium and sodium was added to a final concentration: 50 mM Tris-HCl at pH 7.5, 50/100 mM NaCl, 0-40 mM MgCl2, and was then heated at 53° C. for indicated time for circularization. The best optimized reaction condition including concentration of magnesium and sodium, and incubation time at 53° C., was selected for further experiments.

[0722] The production and purification of the resulting circRNAs were validated with (FIG. 10B).

### 8.11.3. Example 3—Protein Expression from Circular RNAs with IRES-Like Sequences

[0723] To test the function of the IRES-like sequences generated by the method described above, the DNA sequences encoding exemplary IRES-like sequences were cloned into a GFP expression vector (FIGS. 2, 12C, 12D and 12E) or luciferase expression vector (FIG. 15).

[0724] Cells were seeded into 24-well plate at one day before transfection. The purified circRNAs are transfected into cells using Lipofectamine Messenger Max (Invitrogen, LMRNA001) according to the manufacturer's manual. After transfection, cells were cultured at 37° C. for 24 h. The cell lysis and supernatant were collected for luminescence assay using Dual-Luciferase® Reporter Assay System (Promega™, E1910).

### Detection by Western Blot (GFP Expression)

[0725] The translation activity of the basic feature sequence of the translation initiation element was detected by cell transfection and western blot, and the result is shown for exemplary 12-mer polynucleotide sequences (FIGS. 2, 12C, 12D and 12E) and for exemplary 6-mer polynucleotide sequences (FIG. 12B). The results confirm that each translation elements have translation initiation functions, but different sequences (with different numerical scores, or percent rank) have different translation initiation capabilities (i.e., different level of protein and/or RNA expression). This indicates that based on these different sequence feature combinations, it is possible to obtain translation initiation elements with different activities. A higher Numerical score (z-score) corresponds with a higher level of protein expression by western blot.

### Detection by Luciferase Reporter Assay

[0726] Six exemplary circular RNAs were constructed (V1, V3, V4, V5, V6 and V7) and tested using the luciferase reporter assay described above. Each circular RNA comprises an IRES-like sequence and a spacer sequence (e.g., endogenous IRES sequence, linker elements, etc.). The identity of the IRES-like sequence, the numerical score of the IRES-like sequence and the percentile rank of the IRES-like sequence are shown in Table 111. The total length of the insert including both the IRES-like sequence and the various spacer sequences is also shown.

TABLE 111
Exemplary circular RNA for luciferase reporter assay

| | | | | Total length |
|---|---|---|---|---|
| | | | | of inserted |
| | | | | sequence in |
| Circular | IRES-like | Numerical | Percentile | expression |
| RNA | sequence | Score | Rank | vector |
| V1 | SEQ ID NO: 14412 | 506.76 | 99.999% | 91 |
| V3 | SEQ ID NO: 14412 | 506.76 | 99.999% | 128 |
| V4 | SEQ ID NO: 14412 | 506.76 | 99.999% | 163 |
| V5 | SEQ ID NO: 14412 | 506.76 | 99.999% | 163 |
| V6 | SEQ ID NO: 14413 | 104.85 | 99.193% | 91 |
| V7 | SEQ ID NO: 14413 | 104.85 | 99.193% | 91 |

[0727] V1, V3, V4 and V5 (with a higher numerical score and percentile rank) demonstrated a higher level of luminescence compared to V6 and V7 (lower numerical score and percentile rank) (FIG. 15). Together with the western blot assay results described above, it was shown that the use of different IRES-like sequences can be used to control the level of protein expression. The ability to fine-tune adjustments to the expression level (either higher or lower expression) by changing the identity of the IRES-like sequence in the circular RNA constructs is advantageous in therapeutic applications, where a specific threshold or range of protein expression must be met for functional activity. Further, the combination of two or more IRES-like sequences or the combination of an IRES-like sequence with spacer sequences (e.g., endogenous IRES sequence, linker elements, etc.) allow another advantageous mechanism for fine-tuning the expression level in therapeutic applications.

### 8.11.4. Example 4—Detection by Luciferase Reporter Assay

[0728] Five exemplary circular RNAs were constructed (S1, S2, S3, S4 and Gtx) and tested using the luciferase reporter assay described above. Each circular RNA comprises an IRES-like sequence of the present disclosure.

[0729] S1, S2, S3 and S4 demonstrated a higher level of luminescence compared Gtx (9-nt IRES module from the Gtx 5′ UTR that is 100% complementary to the 18S rRNA at nucleotides 1132-1124) (See FIG. 6).

### 8.11.5. Example 5—Methods of Improving IRES-Like Sequences

[0730] The IRES-like sequences identified via methods described herein (e.g., Section 8.2.2.2 and Example 1) were further optimized. As shown in the diagrams in FIG. 3 and FIG. 4, after the initial random sequence generation, Z-score evaluation, and/or sequence selection (FIG. 3 (100), (110), and (120) and FIG. 4 (200), (210), and (220)), additional steps were implemented to introduce mutation into the sequences (FIG. 3 (122) and FIG. 4 (222)), hybridization of sequences (FIG. 3 (121)), and/or crossover of sequences (FIG. 4 (221)). After such modification(s), the IRES-like sequences were evaluated for selection into the top sequence pool (FIG. 3 (130) and FIG. 4 (230)), discarded, or further optimized. Additional rounds of optimization, if needed, were performed.

### 8.11.6. Example 6. Screening of Group II Introns

[0731] This example relates to a method for determining the in vitro self-splicing capability of natural group II introns.

[0732] A DNA sequence according to the natural sequence of a group II intron was synthesized. The DNA sequence further comprised the naturally occurring flanking exon E1 and E2 sequences, including all or part of the intron binding region in the exon immediately adjacent to the group II intron. The DNA sequence was cloned into the expression vector psiCHECK-2 (Promega™, C8021) comprising the coding sequence of Rluc (Renilla Luciferase). psiCHECK-2 was digested with a single endonuclease, XhoI, and the DNA sequence was cloned into a vector, located 3′ downstream of Rluc, to obtain the corresponding construct. The skeleton of this expression vector was pcDNA3.1 comprising a T7 promoter and a T7 terminator.

[0733] PCR amplification was performed on the above vector using universal primers for T7 promoter and T7 terminator to obtain template DNAs for transcription. The PCR reaction conditions were: 95° C. for 30 s, 60° C. for 20 s, and 72° C. for 60 s, for 23 to 25 cycles. The template DNAs obtained were extracted with phenol-chloroform at a volume ratio of 1: 1, and then precipitated with 2.5 times by volume of absolute ethanol for purification.

[0734] The purified template DNAs were transcribed in vitro by T7 RNA polymerase. The transcripts were digested with DNase I at 37° C. for 30 min to degrade the PCR templates. The transcripts were then column purified to obtain high-purity RNAs.

[0735] The column-purified transcript RNAs were added to a self-splicing buffer (10, 20, 50 or 100 mM MgCl₂, 50 mM NaCl, 40 mM Tris-HCl, pH=7.5) for self-splicing reaction. The reaction conditions were: 95° C. for 1 min, 75° C. to 45° C. (−0.5° C., 15 sec/cycle, for 60 cycles in total), holding at 45° C. with a buffer added, 45° C. for 5 min, and 53° C. for 15 to 30 min. After the self-splicing reaction occurred in vitro, 200 ng of the product was used for electrophoresis analysis to detect the self-splicing efficiency of group II introns.

[0736] FIG. 9 shows the electrophoresis results of two group II introns identified by the above method that may perform self-splicing, namely the group II intron Bth from Bacillus thuringiensis and the group II intron Cte from Clostridium tetani. Unspliced RNAs (top row) and spliced RNAs (bottom row) were separated by electrophoresis. The group II intron and its flanking exon sequences (i.e., E1 and E2, each of 6 nucleotides, see Tables 103 and 104) confirmed by the method of this example were used as a precursor for the preparation of the self-splicing ribozyme cRNAzyme, also referred to as a cRNAzyme precursor.

### 8.11.7. Example 7. Preparation of Expression Constructs Comprising IRES-Like Sequence for Circular Construct

[0737] The self-splicing ribozyme cRNAzyme was further prepared from the group II intron cRNAzyme precursor, e.g., according to the method described in Chinese Patent Application No. 202110594352.4. The general principles for designing a cRNAzyme construct are that the total length of the intron sequence and the E1 and E2 sequences is as small as possible, and the cyclization rate is as high as possible. Exemplary sequences used in the preparation of expression constructs comprising IRES-like sequences for circular constructs is shown in Table 108.

[0738] On the basis of the Cte cRNAzyme precursor sequence (SEQ ID NO: 14379, a total of 1,028 nucleotides in length, comprising the Cte intron itself and the exon sequences of 6 nucleotides at both ends, i.e., both E1 and E2 being 6 nucleotides in length), the intron-encoded protein (IEP) sequence of 310 nucleotides in domain 4 (nucleotide positions 625 to 934 of SEQ ID NO: 14379) was deleted, and the sequence that could fold correctly and maintain self-splicing activity was retained, comprising a few parts of exons at both ends (6 nt each, i.e., IBS1 and part of IBS3), thereby obtaining the E1-Cte^{Δ}^{^{IEP}}-E2 sequence. The E1-Cte^{Δ}^{^{IEP}}-E2 sequence was then bisected from a position inside the intron. The positions of the two fragments after segmentation were swapped, a first fragment consisting of E1 and a 5′ intron fragment was constructed to the 3′ end of the insert Rluc, and a second fragment consisting of a 3′ intron fragment and E2 was constructed to the 5′ end of the insert Rluc. On this basis, AATACCTTACTTAATAGTAACAATAGAAAATC (SEQ ID NO: 14391) was inserted at the 5′ end of the newly formed fragment, and AAGCTAGATCATATTACTATTAAGTAAGGTATT (SEQ ID NO: 14392) was inserted at the 3′ end, thereby obtaining a cRNAzyme_Cte construct. See FIG. 5. The two inserted sequences of SEQ ID NO: 14391 and SEQ ID NO: 14392 served as “homology arms” to make the 5′ and 3′ splice sites close to each other and improve the splicing efficiency. Three different segmentation positions were tried, which were located in loop regions in domain 1 (between positions 369 and 370), domain 3 (between positions 560 and 561), and domain 4 (between positions 825 and 826), respectively. Three cRNAzymes were thus formed, named cRNAzyme_Cte V1, cRNAzyme_Cte V2, and cRNAzyme_Cte V3, respectively. In the presence of cations, a self-splicing cyclization reaction was performed in vitro to test the cyclization activity of the obtained cRNAzyme. The splicing effects of the three cRNAzymes are shown in FIG. 10A.

[0739] It was determined that the RNA sequences spanned the E1E2 junction, which proved that E1 and E2 were linked together, and were circularized, as demonstrated by the methods below.

### Method I

[0740] The splice site in the Cte was mutated to lose its cyclization capability, as a linear RNA control of the same length but unable to achieve cyclization. Specifically, the splice site (nucleotides 1 to 26) in SEQ ID NO: 14379 was mutated to change C at position 3 to A, T at position 5 to G, G at position 17 to T, C at position 18 to T, A at position 21 to C, and T at position 26 to G. It would be understood by those skilled in the art that this mutation was intended to disrupt the cyclization capability, and other mutations in different numbers, positions, and types may also be made to achieve similar goal. The mutated Cte was referred to as Cte-mut. A polyA tail was then added to Cte-mut. Since a circular RNA was closed in a head-to-tail manner and had no 3′ end, it can not be poly-adenylated, as a linear RNA. The different in size after polyA addition can be resolved by electrophoresis.

[0741] The specific steps were as follows:
[0742] (1) The purified circular RNAs or control linear RNAs were tailed by poly(A) tailing enzyme (NEB), and the reaction conditions were at 37° C. for 30 min;
[0743] (2) RNase R (Lucigen) was added to digest the linear RNAs, and the reaction conditions were at 37° C. for 30 min; and
[0744] (3) RNAs were subjected to column purification.

[0745] As shown in the upper panel of FIG. 10B, lanes 3 and 4 were products with polyA tails added, while lanes 1 and 2 were products without polyA tails added. In the case of no cyclization, the bands of cRNAzymes based on Cte and Cte-mut all shifted upward after polyA addition reaction, indicating that the molecules became larger and polyA was successfully added. In contrast, the bands presumed to be circular RNAs were substantially at the same position and of the same size with and without the polyA addition reaction.

### Method II

[0746] Digestion was performed with RNase R. RNase R was a 3′-5′ exoribonuclease that may degrade linear RNA molecules de novo; and circular RNAs with closed loop structures can not be degraded. The digestion of RNAs may be identified by electrophoresis.

[0747] The specific steps were as follows:
[0748] (1) Through the annealing reaction, a DNA probe was bound to the RNA. The reaction was run at 95° C. for 2 min, and then slowly and gradually cooled to 25° C. The probe sequences were shown in SEQ ID NOs: 7 and 8.
[0749] (2) The DNA/RNA double strands were digested with RNase H (NEB), and the reaction conditions were at 37° C. for 30 min; and
[0750] (3) RNAs were subjected to column purification.

[0751] As shown in the upper panel of FIG. 10B, lanes 5 and 6 were the results after RNase R treatment, while lanes 1 to 4 were the results without RNase R treatment. It can be seen that the larger linear RNA bands disappeared after RNase R treatment (lanes 5 and 6), while the band presumed to be a circular RNA in lane 5 still existed.

### Method III

[0752] Digestion was performed with RNase H. RNase H is an endoribonuclease that may specifically hydrolyze the RNA in hybrid DNA-RNA strands. Since linear RNAs and circular RNAs had different structures, they may be cleaved into fragments of different lengths by RNase H after being bound to the same DNA probe. By agarose gel electrophoresis, the lengths of the RNA fragments produced by cleavage may be resolved, so as to infer the original structure of RNAs. Specifically, for circular RNAs, two DNA probes were used to bind to RNAs and then the product was cleaved, resulting in two bands. In contrast, if there was no cyclization, but still linearity, the same method should result in three bands. As shown in the lower panel of FIG. 10B, two bands were obtained for the product of the present application.

[0753] The results obtained by the above three methods all confirmed the successful formation of circular RNAs and verified the cyclization activity of the constructed cRNAzyme_Cte.

### 8.11.8. Example 8. Improvement of Self-Splicing Efficiency

### Optimization of Reaction Conditions

[0754] Combinations of various ion concentrations (50 mM and 100 mM NaCl; 2 mM, 5 mM, 10 mM, and 20 mM Mg²⁺) and various reaction times (5 min, 15 min, and 30 min) in the reaction system were tested to determine the optimal reaction system. The reaction system of 20 mM Mg²⁺ and 50 mM NaCl for 15 and 30 minutes significantly increased circularization.

### Sequence Optimization

[0755] The sequence was further engineered according to the RNA secondary structure. For example, the splicing efficiency was improved by incorporating spacer sequences in the target sequence to increase the flexibility of the structure, including, AT-rich sequences as spacer. Other methods or techniques known in the art can also be utilized.

### 8.11.9. Example 9. Preparation of “Scarless” Circular RNAs without Scar Sequences

[0756] The circular RNAs obtained using the aforementioned method comprise a few non-target sequences, i.e., sequences from exons E1 and E2. To remove these sequences, the construct may be further engineered.

[0757] When preparing the cRNAzyme construct, both ends of the target sequence were E2 and E1 with shorter lengths, which were derived from the intron binding sequences (IBS) of the flanking exon regions of the group II intron, respectively, and were generally between 0 to 20 nucleotides in length. With respect to forming circular RNA, although it may be undesirable to comprise sequences other than the target sequences, such as exon sequences E1 and E2, if E1 and E2 were removed directly, the self-splicing circularization process would be affected due to the lack of an IBS sequence that would interact with the EBS or δ sequence in the intron. Accordingly, a part of the target sequence was utilized as an “IBS” sequence, and the EBS or 6 in the intron was modified to interact with the region in the target sequence that is regarded as “IBS”. Such a method removed the dependence on E1 and E2, while ensuring that the cRNAzyme construct has the self-splicing function, and removes the exon sequences from the construct and the final circularization product. Exemplary cRNAzyme constructs with different target sequences (e.g., GFP, Gluc and 2A peptide) were constructed.

[0758] For example, based on the sequences of 6 nucleotides at both ends of each target sequence, the EBSI and upstream sequence of EBSI (including 6) in the group II intron were respectively replaced with sequences at least partially complementarily paired with the two 6-nucleotide sequences. Specifically, upstream sequence of EBS1 (including 6) was allowed to be complementarily paired with 6 nucleotides at the 5′ end of the target sequence in a linear state (such as the state prior to self-splicing circularization of the cRNAzyme construct), and EBSI was allowed to be complementarily paired with 6 nucleotides at the 3′ end of the target sequence in a linear state. Modified EBSI and upstream sequence of EBSI (including 6) were designed for three different target sequences. Notably, the engineered EBS1 and upstream sequence of EBS1 (including 6) did not have to be perfectly complementarily paired with the target sequence fragments serving as “IBS1” and “IBS3”. A certain percentage of mismatches, or a slightly less robust pairing of such as A and G, G and U may be allowed. In general, the EBS1 and upstream sequence of EBS1 (including 6) used to substitute the corresponding sequences in group II introns were complementary paired with the corresponding region in the target sequence on at least 60% of the nucleotide positions, or at least 60% identical to the complementary paired sequence of the corresponding region in the target sequence.

[0759] Circular RNAs were efficiently generated by this engineering method when different target sequences (GFP, Gluc, and 2A peptide) were used (FIG. 11). Sanger sequencing confirmed that such engineering might completely eliminate the exogenous scar sequence. After the circularization of the cRNAzyme construct with the EBS and upstream sequence of EBS1 (including 6) modified as described above, both ends of the target sequence (the two stretches of 6-nucleotide sequences, serving as “IBS1” and “IBS3”, respectively) were directly connected in a head-to-tail manner and the sequence was no longer separated by E1 and E2, which is more beneficial for subsequent applications of the generated circular RNAs. The constructs engineered in this way were referred to as “scarless” constructs, and the circular RNAs after circularization were referred to as “scarless” RNAs.

### 8.11.10. Example 10. Expression of the Therapeutic Product Using the Construct of the Present Disclosure

[0760] The expression of circular RNA products of different target sequences after transfection of cells was further tested. To minimize immunodegradation caused by linear RNAs, the RNA products were treated in the following three steps prior to transfection.
[0761] (1) RNase R treatment was performed to digest linear RNAs. The reaction conditions were at 37° C. for 30 min.
[0762] (2) CIP treatment was performed to remove phosphate groups at both ends of the linear RNAs. The reaction conditions were to add quick CIP (NEB), and react at 37° C. for 30 min.
[0763] (3) HPLC purification was performed to remove small linear RNAs. HPLC conditions: gel exclusion chromatographic column: Waters Xbridge® BEH450A, column temperature: 40° C., flow rate: 1 min/ml, and elution conditions: 0 to 30 min, 100% buffer A (prepared with 10 mM Tris, 0.5 mM EDTA, and DEPC-treated water).

[0764] The target RNAs were transfected using lipo RNAmax (Invitrogen®), under the transfection conditions according to the supplier's instructions, for 24 hours.

[0765] Using the construction methods described in the Examples above, different target sequences were tested. To facilitate detection of protein expression, constructs comprising a fluorescent protein coding sequence together with the IRES sequences disclosed herein were constructed. The addition of IRES may initiate cap-independent non-canonical translation, enabling the translation of coding sequences in circular RNAs into proteins.

[0766] For different target sequences, different methods were used to detect protein expression.

[0767] In the case that the translation product was GFP, the fluorescence was observed under a microscope. In addition, the cells were lysed with RIPA lysis solution (Beyotime), and then the protein expression was detected by Western blotting. In the case that the translation product was luciferase, the cells were first lysed with Passive lysis solution (Promega™) and then the protein expression was detected by a microplate reader using a luciferase detection kit (Promega™). It was confirmed that the expression of Gluc protein was obtained by the method of the present disclosure.

### 8.11.11. Example 11. Administration of circRNAs into Mice

[0768] The circular RNA was encapsulated in a lipid nanoparticle via the NanoAssemblr Ignite system as previously described (Corbett K. S. et al., Nature 586, 567 (2020), Polack F. P., et al., N. Engl. J. Med. 383, 2063 (2020). In brief, an aqueous solution of circRNA at pH 4.0 was rapidly mixed with a lipid mixture dissolved in ethanol, which contain different ionizable cationic lipid, distearoylphosphatidylcholine (DSPC), DMG-PEG2000, and cholesterol. The ratios for the lipid mixture were MC3:DSPC:Cholesterol:PEG-2000=50:10:38.5:1.5 for formulation 1, SM-102:DSPC:Cholesterol:PEG-2000=50:10:38.5:1.5 for formulation 2, and ALC-0315:DSPC:Cholesterol:ALC-0159=46.3:9.4:42.7:1.6 for formulation 3. The resulting LNP mixture was then dialyzed against PBS and stored at −80° C. at a concentration of 0.5 μg/μl for further application.

[0769] Female BALB/C mice aged 8 weeks were purchased from Shanghai Model Organisms Center. 20 μg of CircRNA-LNPs in PBS were administrated into mice intramuscularly with 3/10 insulin syringes (BD biosciences). The serum was collected 24 hours after the administration of the LNP, and 50 pl serum was used for Luciferase activity assay in vitro. Bioluminescence imaging was performed with an IVIS Spectrum (Roper Scientific). 24 hours after Gluc-LNP injection, 2 mg/kg of Coelenterazine (MedChemExpress, MCE) was administrated to mice intraperitoneally. Mice were then anesthetized after receiving the substrate in a chamber with 2.5% isoflurane (RWD Life Science Co.) and placed on the imaging platform while being maintained on 2% isoflurane via a nose cone. Mice were imaged 5 minutes post substrate injection with 30 seconds exposure time to ensure the signal were effectively and sufficiently acquired. The results were shown in FIG. 7.

[0770] For immunogenicity studies, 8-week-old female BALB/c mice (Shanghai Model Organisms Center, Inc) were used. 10 μg of CircRNA-RBD-LNP were diluted in 50 μl 1×PBS and intramuscularly administrated into the mice in the same hind leg for both prime and boost shots. Mice in the control groups received PBS or empty LNPs. The blood samples were collected 2 weeks after prime and boost shots. Mice spleen were also harvested at the end point (2 weeks after boost) for immunostaining and flow cytometry.

### 8.11.12. Example 12. Numerical Score Predictions of IRES-Like Sequences by Statistical Modeling

[0771] In order to predict the highest numerical scores (z-score) for any IRES polynucleotide sequence of any length, without having to generate each sequence permutation and calculating the score, the existing dataset from Example 1 was analyzed for patterns associated with highest numerical scores and a formula was determined for predicting the sequences with the highest numerical scores. The polynucleotide sequences with the highest calculated numerical scores for each total length were determined (FIG. 13A). For example, AAAUAA (SEQ ID NO: 1025) had the highest numerical score (56.73) for a polynucleotide with 6 residues in length (Table 2). AAAUAUA (SEQ ID NO: 1225) had the highest numerical score (84.25) for a polynucleotide with 7 residues in length (Table 3). AAAAUAUA (SEQ ID NO: 1425) had the highest numerical score (103.27) for a polynucleotide with 8 residues in length (Table 4). AAAUAUAUA (SEQ ID NO: 1425) had the highest numerical score (128.17) for a polynucleotide with 9 residues in length (Table 5). By identifying and reviewing the top polynucleotide sequences and numerical scores for those from 6 to 17 total nucleotides in length, certain rules and patterns were determined. For example, the first three residues of each sequence with the highest numerical score in its length category was AAA (FIG. 13A). After binning the first three residues into a segment, the remainder of the residues can be binned into groups of 3-5 nucleotides and the following formulas for binning the residues with the highest Z-score for each polynucleotide length was determined. n is an integer

[0772] For length ≥6 nt
[0773] Length is divisible by 4: AAA+n*AAAA+AUAUA
[0774] Length divided by 4 with a remainder of 1 (length=9): AAA+UA+UAUA
[0775] Length divided by 4 with a remainder of 1 (length=13): AAA+UA+UAAA+UAUA
[0776] Length divided by 4 with a remainder of 1 (length>13): AAA+n*UAAA+UA+UAAA+UAUA
[0777] Length divided by 4 with a remainder of 2: AAA+n*UAAA+UAA
[0778] Length divided by 4 with a remainder of 3: AAA+n*UAAA+UAUA

[0779] The above binning and formulas were used to predict the sequences with the highest numerical scores for poly nucleotides that were 18-21 residues in length and compared to the nucleotide permutations that were tested and calculated (Tables 14-17). The predicted sequence obtained from formula shown above was consistent with sequences that were tested. Next, the above formula was used to generate 10-200 nt highest score sequences and calculate their numerical scores, plotted in FIG. 13B. The scatter points represent the scores calculated and line is the fitted to the scatter points. Using linear fitting, the equation of the graph is: Highest Z-score=(23.74869×length of polynucleotide)−84.85243. The p-values of the slope and intercept are both less than 0.01. For example, using the equation, the highest Z-score for a 12-mer would be: (23.74869×12)−84.85243=200. As another example, the highest Z-score for a 100-mer would be (23.74869×100)−84.85243=2290.

[0780] To further test these equations, each permutation of polynucleotides with 12, 18, 50 or 100 residues in length was generated and the numerical score was determined and ranked (percentile rank) (FIG. 14A). A zoomed in version of the graph is shown in FIGS. 14B, 14C, 14D and 14E, where the points represent the calculated numerical scores. For example, AAAAAAAAUAUA (SEQ ID NO: 2226) is shown with a numerical of 198.32. Thus, it was confirmed that that the linear fitting equation was accurate for predicting the highest numerical scores for each length category.

[0781] The combination of the formulas determined by sequence pattern analysis and the linear equation for predicting numerical scores is advantageous for predicting the sequence and functionality for IRES-like sequences, without having to generate and test each permutation of the sequences at each length. This is advantageous for predicting novel IRES-like sequences that drive protein expression (highest numerical scores) in therapeutic applications.

[0782] All of the compositions and methods disclosed and claimed herein can be made and executed without undue experimentation in light of the present disclosure. While the compositions and methods of this disclosure have been described in terms of preferred embodiments, it will be apparent to those of skill in the art that variations may be applied to the compositions and methods and in the steps or in the sequence of steps of the method described herein without departing from the concept, spirit and scope of the disclosure. All such similar substitutes and modifications are deemed to be within the spirit, scope and concept of the disclosure as defined by the appended claims.

### 8.11.13. Example 13. circRNAs Mediate Prolonged Protein Production

[0783] A major advantage of circular mRNAs was their superb stability because of lacking the free ends, therefore the circRNA should have good shelf life for protein expression compare to linear counterparts. To directly test this, both linear and circular mRNA encoding the Gaussia luciferase (Gluc) were synthesized and stored parallelly in pure water at room temperature for different days before transfecting them into 293 T cells. The activity of the circRNA to direct protein translation was tested in comparison to that of the linear mRNA. The prolonged protein translation was expected for the circRNA.

### 8.11.14. Example 14. Purified circRNAs Direct Robust Translation of Target Proteins

[0784] The mRNA purity was found to be a key factor for the protein production and induction of innate immunity, as the removal of dsRNA by HPLC can eliminate immune activation and improves translation of linear nucleoside-modified mRNA (Kariko, K. et al., (2011). To examine if the circRNAs produced using the cRNAzymes disclosed herein can induce innate immune response and cell toxicity, the circRNAs can be purified with gel purification or HPLC and measured if the circRNAs can induce cellular immune response upon transfection of circRNAs by testing cell survival and production of RIG-I and IFN-B1.

### 8.11.15. Example 15. LNP Encapsulated circRNAs Direct Robust Protein Production in Mouse

[0785] An important question for the therapeutic application of circRNAs was whether the production of circRNAs can be scaled up reliably and how the reproducibility between different batch of production. To confirm the scalability of this system, the IVT and circularization reaction system can be expanded for 50 fold (from 20 1 into 1 ml), and high circularization efficiency was tested. The efficacy was expected to stay essentially unchanged while the total amount of RNA products reach 7.5 mg in a single reaction.

[0786] The circRNAs produced herein can be further encapsulated with lipid nanoparticles (LNP) to for their in vivo delivery. The circRNAs in the aqueous solution were packed by ionizable cationic lipids, which form a nanoparticle with other lipid components such as DMG-PEG2000 and Cholesterol (see methods), achieving a ˜95% encapsulate efficiency with effective diameter at −80 nm. Different ionizable cationic lipids can be tested in our formulation to encapsulate circRNAs that encode Gluc, and the resulting LNPs were into BALC/c mice through intramuscular (IM) or intraperitoneal (IP) injection (n=3 for each experimental group). Three formulations using different ionizable cationic lipids (e.g., MC3, SM-102 and ALC-0315) were tested in this experiment. The expressions of luciferase were assayed either using the luciferase luminescence assay with serum or bioluminescence imaging of the animals.

LENGTHY TABLES
The patent application contains a lengthy table section. A copy of the table is available in electronic form from the USPTO web site (https://seqdata.uspto.gov/?pageRequest=docDetail&DocID=US20250320519A1). An electronic copy of the table will also be available from the USPTO upon request and payment of the fee set forth in 37 CFR 1.19(b)(3).

The application's sequence listing, which the Patent Office published only in electronic form, follows.

SEQUENCE LISTING (15342 sequences)

SEQ ID NO: 1-1825 - skipped (1825 entries)

SEQ ID NO: 1826 - RNA, 10 nt, synthetic construct
  source 1..10: mol_type = other RNA
aaataaataa

SEQ ID NO: 1827 - RNA, 10 nt, synthetic construct
  source 1..10: mol_type = other RNA
aaataaatat

SEQ ID NO: 1828 - RNA, 10 nt, synthetic construct
  source 1..10: mol_type = other RNA
aaaaaatata

SEQ ID NO: 1829 - RNA, 10 nt, synthetic construct
  source 1..10: mol_type = other RNA
aataaatata

SEQ ID NO: 1830 - RNA, 10 nt, synthetic construct
  source 1..10: mol_type = other RNA
aaaatatata

SEQ ID NO: 1831 - RNA, 10 nt, synthetic construct
  source 1..10: mol_type = other RNA
aaaaaaataa

SEQ ID NO: 1832 - RNA, 10 nt, synthetic construct
  source 1..10: mol_type = other RNA
aaaaaataaa

SEQ ID NO: 1833 - RNA, 10 nt, synthetic construct
  source 1..10: mol_type = other RNA
aaaaaaatat

SEQ ID NO: 1834 - RNA, 10 nt, synthetic construct
  source 1..10: mol_type = other RNA
aaataatata

SEQ ID NO: 1835 - RNA, 10 nt, synthetic construct
  source 1..10: mol_type = other RNA
aaatatataa

SEQ ID NO: 1836 - RNA, 10 nt, synthetic construct
  source 1..10: mol_type = other RNA
aaaaaaaata

SEQ ID NO: 1837 - RNA, 10 nt, synthetic construct
  source 1..10: mol_type = other RNA
aaaataaata

SEQ ID NO: 1838 - RNA, 10 nt, synthetic construct
  source 1..10: mol_type = other RNA
aataaataaa

SEQ ID NO: 1839 - RNA, 10 nt, synthetic construct
  source 1..10: mol_type = other RNA
aaaaatataa

SEQ ID NO: 1840 - RNA, 10 nt, synthetic construct
  source 1..10: mol_type = other RNA
aaaatataaa

SEQ ID NO: 1841 - RNA, 10 nt, synthetic construct
  source 1..10: mol_type = other RNA
aaatatatat

SEQ ID NO: 1842 - RNA, 10 nt, synthetic construct
  source 1..10: mol_type = other RNA
aaaaaataat

SEQ ID NO: 1843 - RNA, 10 nt, synthetic construct
  source 1..10: mol_type = other RNA
taaatatata

SEQ ID NO: 1844 - RNA, 10 nt, synthetic construct
  source 1..10: mol_type = other RNA
aaaaatatat

SEQ ID NO: 1845 - RNA, 10 nt, synthetic construct
  source 1..10: mol_type = other RNA
aaaaaaaaaa

SEQ ID NO: 1846 - RNA, 10 nt, synthetic construct
  source 1..10: mol_type = other RNA
aaataaatac

SEQ ID NO: 1847 - RNA, 10 nt, synthetic construct
  source 1..10: mol_type = other RNA
aaataataaa

SEQ ID NO: 1848 - RNA, 10 nt, synthetic construct
  source 1..10: mol_type = other RNA
aaataaaata

SEQ ID NO: 1849 - RNA, 10 nt, synthetic construct
  source 1..10: mol_type = other RNA
aatatatata

SEQ ID NO: 1850 - RNA, 10 nt, synthetic construct
  source 1..10: mol_type = other RNA
taaataaata

SEQ ID NO: 1851 - RNA, 10 nt, synthetic construct
  source 1..10: mol_type = other RNA
aataaataat

SEQ ID NO: 1852 - RNA, 10 nt, synthetic construct
  source 1..10: mol_type = other RNA
atataaataa

SEQ ID NO: 1853 - RNA, 10 nt, synthetic construct
  source 1..10: mol_type = other RNA
aaatatatac

SEQ ID NO: 1854 - RNA, 10 nt, synthetic construct
  source 1..10: mol_type = other RNA
aaaatataat

SEQ ID NO: 1855 - RNA, 10 nt, synthetic construct
  source 1..10: mol_type = other RNA
taaatataaa

SEQ ID NO: 1856 - RNA, 10 nt, synthetic construct
  source 1..10: mol_type = other RNA
aatataaata

SEQ ID NO: 1857 - RNA, 10 nt, synthetic construct
  source 1..10: mol_type = other RNA
tataaatata

SEQ ID NO: 1858 - RNA, 10 nt, synthetic construct
  source 1..10: mol_type = other RNA
ataaatataa

SEQ ID NO: 1859 - RNA, 10 nt, synthetic construct
  source 1..10: mol_type = other RNA
atataaatat

SEQ ID NO: 1860 - RNA, 10 nt, synthetic construct
  source 1..10: mol_type = other RNA
aaatataaat

SEQ ID NO: 1861 - RNA, 10 nt, synthetic construct
  source 1..10: mol_type = other RNA
aaaaaatatt

SEQ ID NO: 1862 - RNA, 10 nt, synthetic construct
  source 1..10: mol_type = other RNA
aaataaaaaa

SEQ ID NO: 1863 - RNA, 10 nt, synthetic construct
  source 1..10: mol_type = other RNA
aaaaatatac

SEQ ID NO: 1864 - RNA, 10 nt, synthetic construct
  source 1..10: mol_type = other RNA
taaaaatata

SEQ ID NO: 1865 - RNA, 10 nt, synthetic construct
  source 1..10: mol_type = other RNA
ataaaatata

SEQ ID NO: 1866 - RNA, 10 nt, synthetic construct
  source 1..10: mol_type = other RNA
ataaatatat

SEQ ID NO: 1867 - RNA, 10 nt, synthetic construct
  source 1..10: mol_type = other RNA
aatatataaa

SEQ ID NO: 1868 - RNA, 10 nt, synthetic construct
  source 1..10: mol_type = other RNA
aaaaaaaaat

SEQ ID NO: 1869 - RNA, 10 nt, synthetic construct
  source 1..10: mol_type = other RNA
aaataataat

SEQ ID NO: 1870 - RNA, 10 nt, synthetic construct
  source 1..10: mol_type = other RNA
aaaaaaatac

SEQ ID NO: 1871 - RNA, 10 nt, synthetic construct
  source 1..10: mol_type = other RNA
aaaaataaat

SEQ ID NO: 1872 - RNA, 10 nt, synthetic construct
  source 1..10: mol_type = other RNA
aaaataataa

SEQ ID NO: 1873 - RNA, 10 nt, synthetic construct
  source 1..10: mol_type = other RNA
aataaatatt

SEQ ID NO: 1874 - RNA, 10 nt, synthetic construct
  source 1..10: mol_type = other RNA
aaatataata

SEQ ID NO: 1875 - RNA, 10 nt, synthetic construct
  source 1..10: mol_type = other RNA
taataaataa

SEQ ID NO: 1876 - RNA, 10 nt, synthetic construct
  source 1..10: mol_type = other RNA
aataaaataa

SEQ ID NO: 1877 - RNA, 10 nt, synthetic construct
  source 1..10: mol_type = other RNA
aaatataaaa

SEQ ID NO: 1878 - RNA, 10 nt, synthetic construct
  source 1..10: mol_type = other RNA
aaaataatat

SEQ ID NO: 1879 - RNA, 10 nt, synthetic construct
  source 1..10: mol_type = other RNA
aaaatatatt

SEQ ID NO: 1880 - RNA, 10 nt, synthetic construct
  source 1..10: mol_type = other RNA
taataaatat

SEQ ID NO: 1881 - RNA, 10 nt, synthetic construct
  source 1..10: mol_type = other RNA
aataaaatat

SEQ ID NO: 1882 - RNA, 10 nt, synthetic construct
  source 1..10: mol_type = other RNA
taaatataat

SEQ ID NO: 1883 - RNA, 10 nt, synthetic construct
  source 1..10: mol_type = other RNA
aaatatatag

SEQ ID NO: 1884 - RNA, 10 nt, synthetic construct
  source 1..10: mol_type = other RNA
tataaataaa

SEQ ID NO: 1885 - RNA, 10 nt, synthetic construct
  source 1..10: mol_type = other RNA
aaaaaataag

SEQ ID NO: 1886 - RNA, 10 nt, synthetic construct
  source 1..10: mol_type = other RNA
aaaaataata

SEQ ID NO: 1887 - RNA, 10 nt, synthetic construct
  source 1..10: mol_type = other RNA
caaaaatata

SEQ ID NO: 1888 - RNA, 10 nt, synthetic construct
  source 1..10: mol_type = other RNA
taaaaaataa

SEQ ID NO: 1889 - RNA, 10 nt, synthetic construct
  source 1..10: mol_type = other RNA
aaaaatatag

SEQ ID NO: 1890 - RNA, 10 nt, synthetic construct
  source 1..10: mol_type = other RNA
aaataaatag

SEQ ID NO: 1891 - RNA, 10 nt, synthetic construct
  source 1..10: mol_type = other RNA
aataaaaata

SEQ ID NO: 1892 - RNA, 10 nt, synthetic construct
  source 1..10: mol_type = other RNA
aaaataaaaa

SEQ ID NO: 1893 - RNA, 10 nt, synthetic construct
  source 1..10: mol_type = other RNA
aaaaataaaa

SEQ ID NO: 1894 - RNA, 10 nt, synthetic construct
  source 1..10: mol_type = other RNA
ataaaaataa

SEQ ID NO: 1895 - RNA, 10 nt, synthetic construct
  source 1..10: mol_type = other RNA
aaataaaaat

SEQ ID NO: 1896 - RNA, 10 nt, synthetic construct
  source 1..10: mol_type = other RNA
taaaaataaa

SEQ ID NO: 1897 - RNA, 10 nt, synthetic construct
  source 1..10: mol_type = other RNA
ataaatatac

SEQ ID NO: 1898 - RNA, 10 nt, synthetic construct
  source 1..10: mol_type = other RNA
aaataatatt

SEQ ID NO: 1899 - RNA, 10 nt, synthetic construct
  source 1..10: mol_type = other RNA
atataatata

SEQ ID NO: 1900 - RNA, 10 nt, synthetic construct
  source 1..10: mol_type = other RNA
ataaaataaa

SEQ ID NO: 1901 - RNA, 10 nt, synthetic construct
  source 1..10: mol_type = other RNA
aatatataat

SEQ ID NO: 1902 - RNA, 10 nt, synthetic construct
  source 1..10: mol_type = other RNA
taaaaaatat

SEQ ID NO: 1903 - RNA, 10 nt, synthetic construct
  source 1..10: mol_type = other RNA
ataaaaatat

SEQ ID NO: 1904 - RNA, 10 nt, synthetic construct
  source 1..10: mol_type = other RNA
atatatataa

SEQ ID NO: 1905 - RNA, 10 nt, synthetic construct
  source 1..10: mol_type = other RNA
ataaataaat

SEQ ID NO: 1906 - RNA, 10 nt, synthetic construct
  source 1..10: mol_type = other RNA
gaaatatata

SEQ ID NO: 1907 - RNA, 10 nt, synthetic construct
  source 1..10: mol_type = other RNA
caaatatata

SEQ ID NO: 1908 - RNA, 10 nt, synthetic construct
  source 1..10: mol_type = other RNA
taaataataa

SEQ ID NO: 1909 - RNA, 10 nt, synthetic construct
  source 1..10: mol_type = other RNA
ataatatata

SEQ ID NO: 1910 - RNA, 10 nt, synthetic construct
  source 1..10: mol_type = other RNA
taaaaaaata

SEQ ID NO: 1911 - RNA, 10 nt, synthetic construct
  source 1..10: mol_type = other RNA
aataaataag

SEQ ID NO: 1912 - RNA, 10 nt, synthetic construct
  source 1..10: mol_type = other RNA
ataaaaaata

SEQ ID NO: 1913 - RNA, 10 nt, synthetic construct
  source 1..10: mol_type = other RNA
aaaatataag

SEQ ID NO: 1914 - RNA, 10 nt, synthetic construct
  source 1..10: mol_type = other RNA
aataaaaaaa

SEQ ID NO: 1915 - RNA, 10 nt, synthetic construct
  source 1..10: mol_type = other RNA
cataaatata

SEQ ID NO: 1916 - RNA, 10 nt, synthetic construct
  source 1..10: mol_type = other RNA
taaataatat

SEQ ID NO: 1917 - RNA, 10 nt, synthetic construct
  source 1..10: mol_type = other RNA
aaatataaac

SEQ ID NO: 1918 - RNA, 10 nt, synthetic construct
  source 1..10: mol_type = other RNA
aatataataa

SEQ ID NO: 1919 - RNA, 10 nt, synthetic construct
  source 1..10: mol_type = other RNA
aataatataa

SEQ ID NO: 1920 - RNA, 10 nt, synthetic construct
  source 1..10: mol_type = other RNA
taaaatataa

SEQ ID NO: 1921 - RNA, 10 nt, synthetic construct
  source 1..10: mol_type = other RNA
tataaataat

SEQ ID NO: 1922 - RNA, 10 nt, synthetic construct
  source 1..10: mol_type = other RNA
tatatatata

SEQ ID NO: 1923 - RNA, 10 nt, synthetic construct
  source 1..10: mol_type = other RNA
atatatatat

SEQ ID NO: 1924 - RNA, 10 nt, synthetic construct
  source 1..10: mol_type = other RNA
aaatataaag

SEQ ID NO: 1925 - RNA, 10 nt, synthetic construct
  source 1..10: mol_type = other RNA
taaatatatt

SEQ ID NO: 1926 - RNA, 10 nt, synthetic construct
  source 1..10: mol_type = other RNA
aaaaaatatc

SEQ ID NO: 1927 - RNA, 10 nt, synthetic construct
  source 1..10: mol_type = other RNA
atataaatac

SEQ ID NO: 1928 - RNA, 10 nt, synthetic construct
  source 1..10: mol_type = other RNA
aatataatat

SEQ ID NO: 1929 - RNA, 10 nt, synthetic construct
  source 1..10: mol_type = other RNA
caaaaaataa

SEQ ID NO: 1930 - RNA, 10 nt, synthetic construct
  source 1..10: mol_type = other RNA
aaataaatta

SEQ ID NO: 1931 - RNA, 10 nt, synthetic construct
  source 1..10: mol_type = other RNA
caaaaataaa

SEQ ID NO: 1932 - RNA, 10 nt, synthetic construct
  source 1..10: mol_type = other RNA
gaaaaatata

SEQ ID NO: 1933 - RNA, 10 nt, synthetic construct
  source 1..10: mol_type = other RNA
gaaataaata

SEQ ID NO: 1934 - RNA, 10 nt, synthetic construct
  source 1..10: mol_type = other RNA
caaataaata

SEQ ID NO: 1935 - RNA, 10 nt, synthetic construct
  source 1..10: mol_type = other RNA
taaaaataat

SEQ ID NO: 1936 - RNA, 10 nt, synthetic construct
  source 1..10: mol_type = other RNA
taataatata

SEQ ID NO: 1937 - RNA, 10 nt, synthetic construct
  source 1..10: mol_type = other RNA
ataataaata

SEQ ID NO: 1938 - RNA, 10 nt, synthetic construct
  source 1..10: mol_type = other RNA
ataaataata

SEQ ID NO: 1939 - RNA, 10 nt, synthetic construct
  source 1..10: mol_type = other RNA
ataaaataat

SEQ ID NO: 1940 - RNA, 10 nt, synthetic construct
  source 1..10: mol_type = other RNA
aataatatat

SEQ ID NO: 1941 - RNA, 10 nt, synthetic construct
  source 1..10: mol_type = other RNA
taaaatatat

SEQ ID NO: 1942 - RNA, 10 nt, synthetic construct
  source 1..10: mol_type = other RNA
atataataaa

SEQ ID NO: 1943 - RNA, 10 nt, synthetic construct
  source 1..10: mol_type = other RNA
atataaaata

SEQ ID NO: 1944 - RNA, 10 nt, synthetic construct
  source 1..10: mol_type = other RNA
taaaaaaaaa

SEQ ID NO: 1945 - RNA, 10 nt, synthetic construct
  source 1..10: mol_type = other RNA
caaaaaatat

SEQ ID NO: 1946 - RNA, 10 nt, synthetic construct
  source 1..10: mol_type = other RNA
taatatataa

SEQ ID NO: 1947 - RNA, 10 nt, synthetic construct
  source 1..10: mol_type = other RNA
taaataaaaa

SEQ ID NO: 1948 - RNA, 10 nt, synthetic construct
  source 1..10: mol_type = other RNA
tatataaata

SEQ ID NO: 1949 - RNA, 10 nt, synthetic construct
  source 1..10: mol_type = other RNA
aaaaaaaatt

SEQ ID NO: 1950 - RNA, 10 nt, synthetic construct
  source 1..10: mol_type = other RNA
ataaaaaaaa

SEQ ID NO: 1951 - RNA, 10 nt, synthetic construct
  source 1..10: mol_type = other RNA
aaaataaatt

SEQ ID NO: 1952 - RNA, 10 nt, synthetic construct
  source 1..10: mol_type = other RNA
aaaaataaac

SEQ ID NO: 1953 - RNA, 10 nt, synthetic construct
  source 1..10: mol_type = other RNA
aaaaaatatg

SEQ ID NO: 1954 - RNA, 10 nt, synthetic construct
  source 1..10: mol_type = other RNA
ataaatatag

SEQ ID NO: 1955 - RNA, 10 nt, synthetic construct
  source 1..10: mol_type = other RNA
ataaataaaa

SEQ ID NO: 1956 - RNA, 10 nt, synthetic construct
  source 1..10: mol_type = other RNA
aatatatatt

SEQ ID NO: 1957 - RNA, 10 nt, synthetic construct
  source 1..10: mol_type = other RNA
aaaaataaag

SEQ ID NO: 1958 - RNA, 10 nt, synthetic construct
  source 1..10: mol_type = other RNA
aaataataag

SEQ ID NO: 1959 - RNA, 10 nt, synthetic construct
  source 1..10: mol_type = other RNA
aaaaaaatag

SEQ ID NO: 1960 - RNA, 10 nt, synthetic construct
  source 1..10: mol_type = other RNA
aaaaaataac

SEQ ID NO: 1961 - RNA, 10 nt, synthetic construct
  source 1..10: mol_type = other RNA
gaaatataaa

SEQ ID NO: 1962 - RNA, 10 nt, synthetic construct
  source 1..10: mol_type = other RNA
aaaataaaat

SEQ ID NO: 1963 - RNA, 10 nt, synthetic construct
  source 1..10: mol_type = other RNA
caaatataaa

SEQ ID NO: 1964 - RNA, 10 nt, synthetic construct
  source 1..10: mol_type = other RNA
aaatataatt

SEQ ID NO: 1965 - RNA, 10 nt, synthetic construct
  source 1..10: mol_type = other RNA
ataatataaa

SEQ ID NO: 1966 - RNA, 10 nt, synthetic construct
  source 1..10: mol_type = other RNA
aatataaaaa

SEQ ID NO: 1967 - RNA, 10 nt, synthetic construct
  source 1..10: mol_type = other RNA
gataaatata

SEQ ID NO: 1968 - RNA, 10 nt, synthetic construct
  source 1..10: mol_type = other RNA
gaataaataa

SEQ ID NO: 1969 - RNA, 10 nt, synthetic construct
  source 1..10: mol_type = other RNA
caaaaaaata

SEQ ID NO: 1970 - RNA, 10 nt, synthetic construct
  source 1..10: mol_type = other RNA
aataaatatc

SEQ ID NO: 1971 - RNA, 10 nt, synthetic construct
  source 1..10: mol_type = other RNA
taatatatat

SEQ ID NO: 1972 - RNA, 10 nt, synthetic construct
  source 1..10: mol_type = other RNA
aaaatataca

SEQ ID NO: 1973 - RNA, 10 nt, synthetic construct
  source 1..10: mol_type = other RNA
tatatataaa

SEQ ID NO: 1974 - RNA, 10 nt, synthetic construct
  source 1..10: mol_type = other RNA
tataaatatt

SEQ ID NO: 1975 - RNA, 10 nt, synthetic construct
  source 1..10: mol_type = other RNA
gaataaatat

SEQ ID NO: 1976 - RNA, 10 nt, synthetic construct
  source 1..10: mol_type = other RNA
aaatataatc

SEQ ID NO: 1977 - RNA, 10 nt, synthetic construct
  source 1..10: mol_type = other RNA
caaaatataa

SEQ ID NO: 1978 - RNA, 10 nt, synthetic construct
  source 1..10: mol_type = other RNA
atatatatac

SEQ ID NO: 1979 - RNA, 10 nt, synthetic construct
  source 1..10: mol_type = other RNA
cataaataaa

SEQ ID NO: 1980 - RNA, 10 nt, synthetic construct
  source 1..10: mol_type = other RNA
atataaaaaa

SEQ ID NO: 1981 - RNA, 10 nt, synthetic construct
  source 1..10: mol_type = other RNA
taaatataag

SEQ ID NO: 1982 - RNA, 10 nt, synthetic construct
  source 1..10: mol_type = other RNA
tataaaataa

SEQ ID NO: 1983 - RNA, 10 nt, synthetic construct
  source 1..10: mol_type = other RNA
aaaataatac

SEQ ID NO: 1984 - RNA, 10 nt, synthetic construct
  source 1..10: mol_type = other RNA
aaaaataatt

SEQ ID NO: 1985 - RNA, 10 nt, synthetic construct
  source 1..10: mol_type = other RNA
aaaatatatc

SEQ ID NO: 1986 - RNA, 10 nt, synthetic construct
  source 1..10: mol_type = other RNA
atatataaat

SEQ ID NO: 1987 - RNA, 10 nt, synthetic construct
  source 1..10: mol_type = other RNA
aataaatatg

SEQ ID NO: 1988 - RNA, 10 nt, synthetic construct
  source 1..10: mol_type = other RNA
taataaatac

SEQ ID NO: 1989 - RNA, 10 nt, synthetic construct
  source 1..10: mol_type = other RNA
aataaaaaat

SEQ ID NO: 1990 - RNA, 10 nt, synthetic construct
  source 1..10: mol_type = other RNA
aaaaaataca

SEQ ID NO: 1991 - RNA, 10 nt, synthetic construct
  source 1..10: mol_type = other RNA
aataaataac

SEQ ID NO: 1992 - RNA, 10 nt, synthetic construct
  source 1..10: mol_type = other RNA
aataaaatac

SEQ ID NO: 1993 - RNA, 10 nt, synthetic construct
  source 1..10: mol_type = other RNA
taaaaatatt

SEQ ID NO: 1994 - RNA, 10 nt, synthetic construct
  source 1..10: mol_type = other RNA
tataaaatat

SEQ ID NO: 1995 - RNA, 10 nt, synthetic construct
  source 1..10: mol_type = other RNA
gaaaaaataa

SEQ ID NO: 1996 - RNA, 10 nt, synthetic construct
  source 1..10: mol_type = other RNA
ataaaatatt

SEQ ID NO: 1997 - RNA, 10 nt, synthetic construct
  source 1..10: mol_type = other RNA
caaaaataat

SEQ ID NO: 1998 - RNA, 10 nt, synthetic construct
  source 1..10: mol_type = other RNA
aaaatataac

SEQ ID NO: 1999 - RNA, 10 nt, synthetic construct
  source 1..10: mol_type = other RNA
aaatatatta

SEQ ID NO: 2000 - RNA, 10 nt, synthetic construct
  source 1..10: mol_type = other RNA
aaataaaatt

SEQ ID NO: 2001 - RNA, 10 nt, synthetic construct
  source 1..10: mol_type = other RNA
gaaaaataaa

SEQ ID NO: 2002 - RNA, 10 nt, synthetic construct
  source 1..10: mol_type = other RNA
aataatatac

SEQ ID NO: 2003 - RNA, 10 nt, synthetic construct
  source 1..10: mol_type = other RNA
taaaatatac

SEQ ID NO: 2004 - RNA, 10 nt, synthetic construct
  source 1..10: mol_type = other RNA
caaaatatat

SEQ ID NO: 2005 - RNA, 10 nt, synthetic construct
  source 1..10: mol_type = other RNA
aaatataatg

SEQ ID NO: 2006 - RNA, 10 nt, synthetic construct
  source 1..10: mol_type = other RNA
caaaaaaaaa

SEQ ID NO: 2007 - RNA, 10 nt, synthetic construct
  source 1..10: mol_type = other RNA
aaaatatact

SEQ ID NO: 2008 - RNA, 10 nt, synthetic construct
  source 1..10: mol_type = other RNA
taataataaa

SEQ ID NO: 2009 - RNA, 10 nt, synthetic construct
  source 1..10: mol_type = other RNA
taataaaata

SEQ ID NO: 2010 - RNA, 10 nt, synthetic construct
  source 1..10: mol_type = other RNA
atataataat

SEQ ID NO: 2011 - RNA, 10 nt, synthetic construct
  source 1..10: mol_type = other RNA
aaaatatatg

SEQ ID NO: 2012 - RNA, 10 nt, synthetic construct
  source 1..10: mol_type = other RNA
aaaaataatc

SEQ ID NO: 2013 - RNA, 10 nt, synthetic construct
  source 1..10: mol_type = other RNA
aaaaaaatta

SEQ ID NO: 2014 - RNA, 10 nt, synthetic construct
  source 1..10: mol_type = other RNA
aaaaaaaaac

SEQ ID NO: 2015 - RNA, 10 nt, synthetic construct
  source 1..10: mol_type = other RNA
aatatataag

SEQ ID NO: 2016 - RNA, 10 nt, synthetic construct
  source 1..10: mol_type = other RNA
gaaaaaatat

SEQ ID NO: 2017 - RNA, 10 nt, synthetic construct
  source 1..10: mol_type = other RNA
aaataatatc

SEQ ID NO: 2018 - RNA, 10 nt, synthetic construct
  source 1..10: mol_type = other RNA
gaaatataat

SEQ ID NO: 2019 - RNA, 10 nt, synthetic construct
  source 1..10: mol_type = other RNA
caaatataat

SEQ ID NO: 2020 - RNA, 10 nt, synthetic construct
  source 1..10: mol_type = other RNA
tataaaaata

SEQ ID NO: 2021 - RNA, 10 nt, synthetic construct
  source 1..10: mol_type = other RNA
taaataaatt

SEQ ID NO: 2022 - RNA, 10 nt, synthetic construct
  source 1..10: mol_type = other RNA
ataatataat

SEQ ID NO: 2023 - RNA, 10 nt, synthetic construct
  source 1..10: mol_type = other RNA
aaaaatatta

SEQ ID NO: 2024 - RNA, 10 nt, synthetic construct
  source 1..10: mol_type = other RNA
taaaaaaaat

SEQ ID NO: 2025 - RNA, 10 nt, synthetic construct
  source 1..10: mol_type = other RNA
ataaataaac

SEQ ID NO: 2026 - RNA, 11 nt, synthetic construct
  source 1..11: mol_type = other RNA
aaataaatata

SEQ ID NO: 2027 - RNA, 11 nt, synthetic construct
  source 1..11: mol_type = other RNA
aaataaataaa

SEQ ID NO: 2028 - RNA, 11 nt, synthetic construct
  source 1..11: mol_type = other RNA
aaaaaaatata

SEQ ID NO: 2029 - RNA, 11 nt, synthetic construct
  source 1..11: mol_type = other RNA
aaatatatata

SEQ ID NO: 2030 - RNA, 11 nt, synthetic construct
  source 1..11: mol_type = other RNA
aaataaataat

SEQ ID NO: 2031 - RNA, 11 nt, synthetic construct
  source 1..11: mol_type = other RNA
aaaaatatata

SEQ ID NO: 2032 - RNA, 11 nt, synthetic construct
  source 1..11: mol_type = other RNA
aaaaaaaataa

SEQ ID NO: 2033 - RNA, 11 nt, synthetic construct
  source 1..11: mol_type = other RNA
aaaataaataa

SEQ ID NO: 2034 - RNA, 11 nt, synthetic construct
  source 1..11: mol_type = other RNA
aaaaaaataaa

SEQ ID NO: 2035 - RNA, 11 nt, synthetic construct
  source 1..11: mol_type = other RNA
aaatataaata

SEQ ID NO: 2036 - RNA, 11 nt, synthetic construct
  source 1..11: mol_type = other RNA
aaaaaaaatat

SEQ ID NO: 2037 - RNA, 11 nt, synthetic construct
  source 1..11: mol_type = other RNA
aaaataaatat

SEQ ID NO: 2038 - RNA, 11 nt, synthetic construct
  source 1..11: mol_type = other RNA
aaatatataaa

SEQ ID NO: 2039 - RNA, 11 nt, synthetic construct
  source 1..11: mol_type = other RNA
aaaaaaaaata

SEQ ID NO: 2040 - RNA, 11 nt, synthetic construct
  source 1..11: mol_type = other RNA
aaaaataaata

SEQ ID NO: 2041 - RNA, 11 nt, synthetic construct
  source 1..11: mol_type = other RNA
aaataaatatt

SEQ ID NO: 2042 - RNA, 11 nt, synthetic construct
  source 1..11: mol_type = other RNA
aaaaaatataa

SEQ ID NO: 2043 - RNA, 11 nt, synthetic construct
  source 1..11: mol_type = other RNA
atataaatata

SEQ ID NO: 2044 - RNA, 11 nt, synthetic construct
  source 1..11: mol_type = other RNA
aaaaatataaa

SEQ ID NO: 2045 - RNA, 11 nt, synthetic construct
  source 1..11: mol_type = other RNA
aaataaaataa

SEQ ID NO: 2046 - RNA, 11 nt, synthetic construct
  source 1..11: mol_type = other RNA
aaaaaaataat

SEQ ID NO: 2047 - RNA, 11 nt, synthetic construct
  source 1..11: mol_type = other RNA
aaataaaatat

SEQ ID NO: 2048 - RNA, 11 nt, synthetic construct
  source 1..11: mol_type = other RNA
aaaaaatatat

SEQ ID NO: 2049 - RNA, 11 nt, synthetic construct
  source 1..11: mol_type = other RNA
taaataaataa

SEQ ID NO: 2050 - RNA, 11 nt, synthetic construct
  source 1..11: mol_type = other RNA
ataaatatata

SEQ ID NO: 2051 - RNA, 11 nt, synthetic construct
  source 1..11: mol_type = other RNA
aaaaaaaaaaa

SEQ ID NO: 2052 - RNA, 11 nt, synthetic construct
  source 1..11: mol_type = other RNA
taaataaatat

SEQ ID NO: 2053 - RNA, 11 nt, synthetic construct
  source 1..11: mol_type = other RNA
aatataaataa

SEQ ID NO: 2054 - RNA, 11 nt, synthetic construct
  source 1..11: mol_type = other RNA
aataaatataa

SEQ ID NO: 2055 - RNA, 11 nt, synthetic construct
  source 1..11: mol_type = other RNA
aaataaaaata

SEQ ID NO: 2056 - RNA, 11 nt, synthetic construct
  source 1..11: mol_type = other RNA
aaatatataat

SEQ ID NO: 2057 - RNA, 11 nt, synthetic construct
  source 1..11: mol_type = other RNA
aatataaatat

SEQ ID NO: 2058 - RNA, 11 nt, synthetic construct
  source 1..11: mol_type = other RNA
aaaataatata

SEQ ID NO: 2059 - RNA, 11 nt, synthetic construct
  source 1..11: mol_type = other RNA
aaaatatataa

SEQ ID NO: 2060 - RNA, 11 nt, synthetic construct
  source 1..11: mol_type = other RNA
taataaatata

SEQ ID NO: 2061 - RNA, 11 nt, synthetic construct
  source 1..11: mol_type = other RNA
ataaataaata

SEQ ID NO: 2062 - RNA, 11 nt, synthetic construct
  source 1..11: mol_type = other RNA
aataaaatata

SEQ ID NO: 2063 - RNA, 11 nt, synthetic construct
  source 1..11: mol_type = other RNA
aataaatatat

SEQ ID NO: 2064 - RNA, 11 nt, synthetic construct
  source 1..11: mol_type = other RNA
atataaataaa

SEQ ID NO: 2065 - RNA, 11 nt, synthetic construct
  source 1..11: mol_type = other RNA
aaaaatataat

SEQ ID NO: 2066 - RNA, 11 nt, synthetic construct
  source 1..11: mol_type = other RNA
aaataaataag

SEQ ID NO: 2067 - RNA, 11 nt, synthetic construct
  source 1..11: mol_type = other RNA
aaaaaaatatt

SEQ ID NO: 2068 - RNA, 11 nt, synthetic construct
  source 1..11: mol_type = other RNA
ataaatataaa

SEQ ID NO: 2069 - RNA, 11 nt, synthetic construct
  source 1..11: mol_type = other RNA
aaataaaaaaa

SEQ ID NO: 2070 - RNA, 11 nt, synthetic construct
  source 1..11: mol_type = other RNA
aaaatatatat

SEQ ID NO: 2071 - RNA, 11 nt, synthetic construct
  source 1..11: mol_type = other RNA
aaaaaatatac

SEQ ID NO: 2072 - RNA, 11 nt, synthetic construct
  source 1..11: mol_type = other RNA
aaatataataa

SEQ ID NO: 2073 - RNA, 11 nt, synthetic construct
  source 1..11: mol_type = other RNA
aaataatataa

SEQ ID NO: 2074 - RNA, 11 nt, synthetic construct
  source 1..11: mol_type = other RNA
taaaaaatata

SEQ ID NO: 2075 - RNA, 11 nt, synthetic construct
  source 1..11: mol_type = other RNA
ataaaaatata

SEQ ID NO: 2076 - RNA, 11 nt, synthetic construct
  source 1..11: mol_type = other RNA
aaatataatat

SEQ ID NO: 2077 - RNA, 11 nt, synthetic construct
  source 1..11: mol_type = other RNA
aaaaaaaaaat

SEQ ID NO: 2078 - RNA, 11 nt, synthetic construct
  source 1..11: mol_type = other RNA
aaaaaataaat

SEQ ID NO: 2079 - RNA, 11 nt, synthetic construct
  source 1..11: mol_type = other RNA
aaaaaaaatac

SEQ ID NO: 2080 - RNA, 11 nt, synthetic construct
  source 1..11: mol_type = other RNA
aaaataaatac

SEQ ID NO: 2081 - RNA, 11 nt, synthetic construct
  source 1..11: mol_type = other RNA
aaataatatat

SEQ ID NO: 2082 - RNA, 11 nt, synthetic construct
  source 1..11: mol_type = other RNA
aaaaataataa

SEQ ID NO: 2083 - RNA, 11 nt, synthetic construct
  source 1..11: mol_type = other RNA
aaatatatatt

SEQ ID NO: 2084 - RNA, 11 nt, synthetic construct
  source 1..11: mol_type = other RNA
aaaataaaata

SEQ ID NO: 2085 - RNA, 11 nt, synthetic construct
  source 1..11: mol_type = other RNA
aaaataataaa

SEQ ID NO: 2086 - RNA, 11 nt, synthetic construct
  source 1..11: mol_type = other RNA
taaataatata

SEQ ID NO: 2087 - RNA, 11 nt, synthetic construct
  source 1..11: mol_type = other RNA
aataaaaataa

SEQ ID NO: 2088 - RNA, 11 nt, synthetic construct
  source 1..11: mol_type = other RNA
aataaatatac

SEQ ID NO: 2089 - RNA, 11 nt, synthetic construct
  source 1..11: mol_type = other RNA
taataaataaa

SEQ ID NO: 2090 - RNA, 11 nt, synthetic construct
  source 1..11: mol_type = other RNA
aaatataaaaa

SEQ ID NO: 2091 - RNA, 11 nt, synthetic construct
  source 1..11: mol_type = other RNA
aaaaataatat

SEQ ID NO: 2092 - RNA, 11 nt, synthetic construct
  source 1..11: mol_type = other RNA
aataaaataaa

SEQ ID NO: 2093 - RNA, 11 nt, synthetic construct
  source 1..11: mol_type = other RNA
atataaataat

SEQ ID NO: 2094 - RNA, 11 nt, synthetic construct
  source 1..11: mol_type = other RNA
atatatatata

SEQ ID NO: 2095 - RNA, 11 nt, synthetic construct
  source 1..11: mol_type = other RNA
taaatatataa

SEQ ID NO: 2096 - RNA, 11 nt, synthetic construct
  source 1..11: mol_type = other RNA
aaataaatatc

SEQ ID NO: 2097 - RNA, 11 nt, synthetic construct
  source 1..11: mol_type = other RNA
aaaaatatatt

SEQ ID NO: 2098 - RNA, 11 nt, synthetic construct
  source 1..11: mol_type = other RNA
aataaaaatat

SEQ ID NO: 2099 - RNA, 11 nt, synthetic construct
  source 1..11: mol_type = other RNA
aatataatata

SEQ ID NO: 2100 - RNA, 11 nt, synthetic construct
  source 1..11: mol_type = other RNA
ataaatataat

SEQ ID NO: 2101 - RNA, 11 nt, synthetic construct
  source 1..11: mol_type = other RNA
aaaatatatac

SEQ ID NO: 2102 - RNA, 11 nt, synthetic construct
  source 1..11: mol_type = other RNA
aataaataaat

SEQ ID NO: 2103 - RNA, 11 nt, synthetic construct
  source 1..11: mol_type = other RNA
aaaaaaataag

SEQ ID NO: 2104 - RNA, 11 nt, synthetic construct
  source 1..11: mol_type = other RNA
aaaaaataata

SEQ ID NO: 2105 - RNA, 11 nt, synthetic construct
  source 1..11: mol_type = other RNA
aaaatataaat

SEQ ID NO: 2106 - RNA, 11 nt, synthetic construct
  source 1..11: mol_type = other RNA
aataatatata

SEQ ID NO: 2107 - RNA, 11 nt, synthetic construct
  source 1..11: mol_type = other RNA
taaaatatata

SEQ ID NO: 2108 - RNA, 11 nt, synthetic construct
  source 1..11: mol_type = other RNA
caaaaaatata

SEQ ID NO: 2109 - RNA, 11 nt, synthetic construct
  source 1..11: mol_type = other RNA
taaatatatat

SEQ ID NO: 2110 - RNA, 11 nt, synthetic construct
  source 1..11: mol_type = other RNA
taaaaaaataa

SEQ ID NO: 2111 - RNA, 11 nt, synthetic construct
  source 1..11: mol_type = other RNA
atatataaata

SEQ ID NO: 2112 - RNA, 11 nt, synthetic construct
  source 1..11: mol_type = other RNA
aaataaatatg

SEQ ID NO: 2113 - RNA, 11 nt, synthetic construct
  source 1..11: mol_type = other RNA
aatatatataa

SEQ ID NO: 2114 - RNA, 11 nt, synthetic construct
  source 1..11: mol_type = other RNA
aaaaaatatag

SEQ ID NO: 2115 - RNA, 11 nt, synthetic construct
  source 1..11: mol_type = other RNA
aaaataaaaaa

SEQ ID NO: 2116 - RNA, 11 nt, synthetic construct
  source 1..11: mol_type = other RNA
aataaaaaata

SEQ ID NO: 2117 - RNA, 11 nt, synthetic construct
  source 1..11: mol_type = other RNA
aaaaaataaaa

SEQ ID NO: 2118 - RNA, 11 nt, synthetic construct
  source 1..11: mol_type = other RNA
aaaaataaaaa

SEQ ID NO: 2119 - RNA, 11 nt, synthetic construct
  source 1..11: mol_type = other RNA
taaaaaataaa

SEQ ID NO: 2120 - RNA, 11 nt, synthetic construct
  source 1..11: mol_type = other RNA
ataaaaaataa

SEQ ID NO: 2121 - RNA, 11 nt, synthetic construct
  source 1..11: mol_type = other RNA
aaataaaaaat

SEQ ID NO: 2122 - RNA, 11 nt, synthetic construct
  source 1..11: mol_type = other RNA
aaataaataac

SEQ ID NO: 2123 - RNA, 11 nt, synthetic construct
  source 1..11: mol_type = other RNA
aaataaaatac

SEQ ID NO: 2124 - RNA, 11 nt, synthetic construct
  source 1..11: mol_type = other RNA
ataaaaataaa

SEQ ID NO: 2125 - RNA, 11 nt, synthetic construct
  source 1..11: mol_type = other RNA
taaaaaaatat

SEQ ID NO: 2126 - RNA, 11 nt, synthetic construct
  source 1..11: mol_type = other RNA
aaataatatac

SEQ ID NO: 2127 - RNA, 11 nt, synthetic construct
  source 1..11: mol_type = other RNA
ataaaaaatat

SEQ ID NO: 2128 - RNA, 11 nt, synthetic construct
  source 1..11: mol_type = other RNA
taaataaatac

SEQ ID NO: 2129 - RNA, 11 nt, synthetic construct
  source 1..11: mol_type = other RNA
aaatatataag

SEQ ID NO: 2130 - RNA, 11 nt, synthetic construct
  source 1..11: mol_type = other RNA
taatatatata

SEQ ID NO: 2131 - RNA, 11 nt, synthetic construct
  source 1..11: mol_type = other RNA
aatatatatat

SEQ ID NO: 2132 - RNA, 11 nt, synthetic construct
  source 1..11: mol_type = other RNA
aaaataataat

SEQ ID NO: 2133 - RNA, 11 nt, synthetic construct
  source 1..11: mol_type = other RNA
atatatataaa

SEQ ID NO: 2134 - RNA, 11 nt, synthetic construct
  source 1..11: mol_type = other RNA
tataaatataa

SEQ ID NO: 2135 - RNA, 11 nt, synthetic construct
  source 1..11: mol_type = other RNA
atataaatatt

SEQ ID NO: 2136 - RNA, 11 nt, synthetic construct
  source 1..11: mol_type = other RNA
gaataaatata

SEQ ID NO: 2137 - RNA, 11 nt, synthetic construct
  source 1..11: mol_type = other RNA
gaaataaataa

SEQ ID NO: 2138 - RNA, 11 nt, synthetic construct
  source 1..11: mol_type = other RNA
caaataaataa

SEQ ID NO: 2139 - RNA, 11 nt, synthetic construct
  source 1..11: mol_type = other RNA
taaaaaaaata

SEQ ID NO: 2140 - RNA, 11 nt, synthetic construct
  source 1..11: mol_type = other RNA
taaataataaa

SEQ ID NO: 2141 - RNA, 11 nt, synthetic construct
  source 1..11: mol_type = other RNA
aaataataaat

SEQ ID NO: 2142 - RNA, 11 nt, synthetic construct
  source 1..11: mol_type = other RNA
taataaataat

SEQ ID NO: 2143 - RNA, 11 nt, synthetic construct
  source 1..11: mol_type = other RNA
aataataaata

SEQ ID NO: 2144 - RNA, 11 nt, synthetic construct
  source 1..11: mol_type = other RNA
aataaataata

SEQ ID NO: 2145 - RNA, 11 nt, synthetic construct
  source 1..11: mol_type = other RNA
ataaataataa

SEQ ID NO: 2146 - RNA, 11 nt, synthetic construct
  source 1..11: mol_type = other RNA
ataataaataa

SEQ ID NO: 2147 - RNA, 11 nt, synthetic construct
  source 1..11: mol_type = other RNA
taaataaaata

SEQ ID NO: 2148 - RNA, 11 nt, synthetic construct
  source 1..11: mol_type = other RNA
taaaataaata

SEQ ID NO: 2149 - RNA, 11 nt, synthetic construct
  source 1..11: mol_type = other RNA
aataaaataat

SEQ ID NO: 2150 - RNA, 11 nt, synthetic construct
  source 1..11: mol_type = other RNA
aatataaatac

SEQ ID NO: 2151 - RNA, 11 nt, synthetic construct
  source 1..11: mol_type = other RNA
ataaaaaaata

SEQ ID NO: 2152 - RNA, 11 nt, synthetic construct
  source 1..11: mol_type = other RNA
atataaaataa

SEQ ID NO: 2153 - RNA, 11 nt, synthetic construct
  source 1..11: mol_type = other RNA
tatataaataa

SEQ ID NO: 2154 - RNA, 11 nt, synthetic construct
  source 1..11: mol_type = other RNA
aaaaatataag

SEQ ID NO: 2155 - RNA, 11 nt, synthetic construct
  source 1..11: mol_type = other RNA
aaaatataata

SEQ ID NO: 2156 - RNA, 11 nt, synthetic construct
  source 1..11: mol_type = other RNA
aataaaaaaaa

SEQ ID NO: 2157 - RNA, 11 nt, synthetic construct
  source 1..11: mol_type = other RNA
aataaatatag

SEQ ID NO: 2158 - RNA, 11 nt, synthetic construct
  source 1..11: mol_type = other RNA
aataaataaaa

SEQ ID NO: 2159 - RNA, 11 nt, synthetic construct
  source 1..11: mol_type = other RNA
aaataaataca

SEQ ID NO: 2160 - RNA, 11 nt, synthetic construct
  source 1..11: mol_type = other RNA
gaaataaatat

SEQ ID NO: 2161 - RNA, 11 nt, synthetic construct
  source 1..11: mol_type = other RNA
caaataaatat

SEQ ID NO: 2162 - RNA, 11 nt, synthetic construct
  source 1..11: mol_type = other RNA
aaatataaatt

SEQ ID NO: 2163 - RNA, 11 nt, synthetic construct
  source 1..11: mol_type = other RNA
taaaaatataa

SEQ ID NO: 2164 - RNA, 11 nt, synthetic construct
  source 1..11: mol_type = other RNA
ataataaatat

SEQ ID NO: 2165 - RNA, 11 nt, synthetic construct
  source 1..11: mol_type = other RNA
ataaataatat

SEQ ID NO: 2166 - RNA, 11 nt, synthetic construct
  source 1..11: mol_type = other RNA
taatataaata

SEQ ID NO: 2167 - RNA, 11 nt, synthetic construct
  source 1..11: mol_type = other RNA
aatataataaa

SEQ ID NO: 2168 - RNA, 11 nt, synthetic construct
  source 1..11: mol_type = other RNA
aataatataaa

SEQ ID NO: 2169 - RNA, 11 nt, synthetic construct
  source 1..11: mol_type = other RNA
aaaatataaaa

SEQ ID NO: 2170 - RNA, 11 nt, synthetic construct
  source 1..11: mol_type = other RNA
aatataaaata

SEQ ID NO: 2171 - RNA, 11 nt, synthetic construct
  source 1..11: mol_type = other RNA
tataaaatata

SEQ ID NO: 2172 - RNA, 11 nt, synthetic construct
  source 1..11: mol_type = other RNA
taaaatataaa

SEQ ID NO: 2173 - RNA, 11 nt, synthetic construct
  source 1..11: mol_type = other RNA
aaatataaaat

SEQ ID NO: 2174 - RNA, 11 nt, synthetic construct
  source 1..11: mol_type = other RNA
ataaaatataa

SEQ ID NO: 2175 - RNA, 11 nt, synthetic construct
  source 1..11: mol_type = other RNA
atataaaatat

SEQ ID NO: 2176 - RNA, 11 nt, synthetic construct
  source 1..11: mol_type = other RNA
tataaatatat

SEQ ID NO: 2177 - RNA, 11 nt, synthetic construct
  source 1..11: mol_type = other RNA
tatataaatat

SEQ ID NO: 2178 - RNA, 11 nt, synthetic construct
  source 1..11: mol_type = other RNA
ataaatatatt

SEQ ID NO: 2179 - RNA, 11 nt, synthetic construct
  source 1..11: mol_type = other RNA
aaaaaaatatc

SEQ ID NO: 2180 - RNA, 11 nt, synthetic construct
  source 1..11: mol_type = other RNA
caaaatatata

SEQ ID NO: 2181 - RNA, 11 nt, synthetic construct
  source 1..11: mol_type = other RNA
taaatatatac

SEQ ID NO: 2182 - RNA, 11 nt, synthetic construct
  source 1..11: mol_type = other RNA
caaaaaaataa

SEQ ID NO: 2183 - RNA, 11 nt, synthetic construct
  source 1..11: mol_type = other RNA
aaaatatatag

SEQ ID NO: 2184 - RNA, 11 nt, synthetic construct
  source 1..11: mol_type = other RNA
caaaaaataaa

SEQ ID NO: 2185 - RNA, 11 nt, synthetic construct
  source 1..11: mol_type = other RNA
gaaaaaatata

SEQ ID NO: 2186 - RNA, 11 nt, synthetic construct
  source 1..11: mol_type = other RNA
taaaaaataat

SEQ ID NO: 2187 - RNA, 11 nt, synthetic construct
  source 1..11: mol_type = other RNA
taaatataaat

SEQ ID NO: 2188 - RNA, 11 nt, synthetic construct
  source 1..11: mol_type = other RNA
ataaaaataat

SEQ ID NO: 2189 - RNA, 11 nt, synthetic construct
  source 1..11: mol_type = other RNA
taaaaatatat

SEQ ID NO: 2190 - RNA, 11 nt, synthetic construct
  source 1..11: mol_type = other RNA
atataaaaata

SEQ ID NO: 2191 - RNA, 11 nt, synthetic construct
  source 1..11: mol_type = other RNA
taaaaaaaaaa

SEQ ID NO: 2192 - RNA, 11 nt, synthetic construct
  source 1..11: mol_type = other RNA
caaaaaaatat

SEQ ID NO: 2193 - RNA, 11 nt, synthetic construct
  source 1..11: mol_type = other RNA
taaataaaaaa

SEQ ID NO: 2194 - RNA, 11 nt, synthetic construct
  source 1..11: mol_type = other RNA
aaaaaaaaatt

SEQ ID NO: 2195 - RNA, 11 nt, synthetic construct
  source 1..11: mol_type = other RNA
ataaaatatat

SEQ ID NO: 2196 - RNA, 11 nt, synthetic construct
  source 1..11: mol_type = other RNA
ataaaaaaaaa

SEQ ID NO: 2197 - RNA, 11 nt, synthetic construct
  source 1..11: mol_type = other RNA
taatatataaa

SEQ ID NO: 2198 - RNA, 11 nt, synthetic construct
  source 1..11: mol_type = other RNA
aaaaataaatt

SEQ ID NO: 2199 - RNA, 11 nt, synthetic construct
  source 1..11: mol_type = other RNA
aaaaaataaac

SEQ ID NO: 2200 - RNA, 11 nt, synthetic construct
  source 1..11: mol_type = other RNA
aaaaaaatatg

SEQ ID NO: 2201 - RNA, 11 nt, synthetic construct
  source 1..11: mol_type = other RNA
aaataaatact

SEQ ID NO: 2202 - RNA, 11 nt, synthetic construct
  source 1..11: mol_type = other RNA
ataaataaaaa

SEQ ID NO: 2203 - RNA, 11 nt, synthetic construct
  source 1..11: mol_type = other RNA
aaaaaataaag

SEQ ID NO: 2204 - RNA, 11 nt, synthetic construct
  source 1..11: mol_type = other RNA
aaataataata

SEQ ID NO: 2205 - RNA, 11 nt, synthetic construct
  source 1..11: mol_type = other RNA
aaaaaaaatag

SEQ ID NO: 2206 - RNA, 11 nt, synthetic construct
  source 1..11: mol_type = other RNA
aaaaaaataac

SEQ ID NO: 2207 - RNA, 11 nt, synthetic construct
  source 1..11: mol_type = other RNA
aaaataaatag

SEQ ID NO: 2208 - RNA, 11 nt, synthetic construct
  source 1..11: mol_type = other RNA
aaaataaaaat

SEQ ID NO: 2209 - RNA, 11 nt, synthetic construct
  source 1..11: mol_type = other RNA
aaaaataaaat

SEQ ID NO: 2210 - RNA, 11 nt, synthetic construct
  source 1..11: mol_type = other RNA
aaatatataca

SEQ ID NO: 2211 - RNA, 11 nt, synthetic construct
  source 1..11: mol_type = other RNA
aaatataatac

SEQ ID NO: 2212 - RNA, 11 nt, synthetic construct
  source 1..11: mol_type = other RNA
aaaataatatt

SEQ ID NO: 2213 - RNA, 11 nt, synthetic construct
  source 1..11: mol_type = other RNA
aatatatatac

SEQ ID NO: 2214 - RNA, 11 nt, synthetic construct
  source 1..11: mol_type = other RNA
aaataatatag

SEQ ID NO: 2215 - RNA, 11 nt, synthetic construct
  source 1..11: mol_type = other RNA
aaataataaaa

SEQ ID NO: 2216 - RNA, 11 nt, synthetic construct
  source 1..11: mol_type = other RNA
aatataaaaaa

SEQ ID NO: 2217 - RNA, 11 nt, synthetic construct
  source 1..11: mol_type = other RNA
atatatataat

SEQ ID NO: 2218 - RNA, 11 nt, synthetic construct
  source 1..11: mol_type = other RNA
taataaatatt

SEQ ID NO: 2219 - RNA, 11 nt, synthetic construct
  source 1..11: mol_type = other RNA
aataaaatatt

SEQ ID NO: 2220 - RNA, 11 nt, synthetic construct
  source 1..11: mol_type = other RNA
caaaaaaaata

SEQ ID NO: 2221 - RNA, 11 nt, synthetic construct
  source 1..11: mol_type = other RNA
aatatataaat

SEQ ID NO: 2222 - RNA, 11 nt, synthetic construct
  source 1..11: mol_type = other RNA
caaaataaata

SEQ ID NO: 2223 - RNA, 11 nt, synthetic construct
  source 1..11: mol_type = other RNA
gaataaataaa

SEQ ID NO: 2224 - RNA, 11 nt, synthetic construct
  source 1..11: mol_type = other RNA
aaatatatatc

SEQ ID NO: 2225 - RNA, 11 nt, synthetic construct
  source 1..11: mol_type = other RNA
taaataataat

SEQ ID NO: 2226 - RNA, 12 nt, synthetic construct
  source 1..12: mol_type = other RNA
aaaaaaaatata

SEQ ID NO: 2227 - RNA, 12 nt, synthetic construct
  source 1..12: mol_type = other RNA
aaaataaatata

SEQ ID NO: 2228 - RNA, 12 nt, synthetic construct
  source 1..12: mol_type = other RNA
aaataaatataa

SEQ ID NO: 2229 - RNA, 12 nt, synthetic construct
  source 1..12: mol_type = other RNA
aaatataaataa

SEQ ID NO: 2230 - RNA, 12 nt, synthetic construct
  source 1..12: mol_type = other RNA
aaatataaatat

SEQ ID NO: 2231 - RNA, 12 nt, synthetic construct
  source 1..12: mol_type = other RNA
aaataaaatata

SEQ ID NO: 2232 - RNA, 12 nt, synthetic construct
  source 1..12: mol_type = other RNA
aaataaatatat

SEQ ID NO: 2233 - RNA, 12 nt, synthetic construct
  source 1..12: mol_type = other RNA
aaaaaatatata

SEQ ID NO: 2234 - RNA, 12 nt, synthetic construct
  source 1..12: mol_type = other RNA
aaaaaaaaataa

SEQ ID NO: 2235 - RNA, 12 nt, synthetic construct
  source 1..12: mol_type = other RNA
aaaaataaataa

SEQ ID NO: 2236 - RNA, 12 nt, synthetic construct
  source 1..12: mol_type = other RNA
aaaaaaaataaa

SEQ ID NO: 2237 - RNA, 12 nt, synthetic construct
  source 1..12: mol_type = other RNA
aaaataaataaa

SEQ ID NO: 2238 - RNA, 12 nt, synthetic construct
  source 1..12: mol_type = other RNA
taaataaatata

SEQ ID NO: 2239 - RNA, 12 nt, synthetic construct
  source 1..12: mol_type = other RNA
aaaaaaaaatat

SEQ ID NO: 2240 - RNA, 12 nt, synthetic construct
  source 1..12: mol_type = other RNA
aaaaataaatat

SEQ ID NO: 2241 - RNA, 12 nt, synthetic construct
  source 1..12: mol_type = other RNA
aatataaatata

SEQ ID NO: 2242 - RNA, 12 nt, synthetic construct
  source 1..12: mol_type = other RNA
aaaaaaaaaata

SEQ ID NO: 2243 - RNA, 12 nt, synthetic construct
  source 1..12: mol_type = other RNA
aaaaaataaata

SEQ ID NO: 2244 - RNA, 12 nt, synthetic construct
  source 1..12: mol_type = other RNA
aataaatatata

SEQ ID NO: 2245 - RNA, 12 nt, synthetic construct
  source 1..12: mol_type = other RNA
aaaaaaatataa

SEQ ID NO: 2246 - RNA, 12 nt, synthetic construct
  source 1..12: mol_type = other RNA
aaaaaatataaa

SEQ ID NO: 2247 - RNA, 12 nt, synthetic construct
  source 1..12: mol_type = other RNA
aaataaaaataa

SEQ ID NO: 2248 - RNA, 12 nt, synthetic construct
  source 1..12: mol_type = other RNA
aaataaatatac

SEQ ID NO: 2249 - RNA, 12 nt, synthetic construct
  source 1..12: mol_type = other RNA
aaaatatatata

SEQ ID NO: 2250 - RNA, 12 nt, synthetic construct
  source 1..12: mol_type = other RNA
aaataaaataaa

SEQ ID NO: 2251 - RNA, 12 nt, synthetic construct
  source 1..12: mol_type = other RNA
aaaaaaaataat

SEQ ID NO: 2252 - RNA, 12 nt, synthetic construct
  source 1..12: mol_type = other RNA
aaataaaaatat

SEQ ID NO: 2253 - RNA, 12 nt, synthetic construct
  source 1..12: mol_type = other RNA
aaaataaataat

SEQ ID NO: 2254 - RNA, 12 nt, synthetic construct
  source 1..12: mol_type = other RNA
aaatataatata

SEQ ID NO: 2255 - RNA, 12 nt, synthetic construct
  source 1..12: mol_type = other RNA
aaaaaaatatat

SEQ ID NO: 2256 - RNA, 12 nt, synthetic construct
  source 1..12: mol_type = other RNA
aaaaaaaaaaaa

SEQ ID NO: 2257 - RNA, 12 nt, synthetic construct
  source 1..12: mol_type = other RNA
ataaataaataa

SEQ ID NO: 2258 - RNA, 12 nt, synthetic construct
  source 1..12: mol_type = other RNA
aataaataaata

SEQ ID NO: 2259 - RNA, 12 nt, synthetic construct
  source 1..12: mol_type = other RNA
aaataaataaat

SEQ ID NO: 2260 - RNA, 12 nt, synthetic construct
  source 1..12: mol_type = other RNA
taaataaataaa

SEQ ID NO: 2261 - RNA, 12 nt, synthetic construct
  source 1..12: mol_type = other RNA
aaaatataaata

SEQ ID NO: 2262 - RNA, 12 nt, synthetic construct
  source 1..12: mol_type = other RNA
aaataatatata

SEQ ID NO: 2263 - RNA, 12 nt, synthetic construct
  source 1..12: mol_type = other RNA
aaatatatataa

SEQ ID NO: 2264 - RNA, 12 nt, synthetic construct
  source 1..12: mol_type = other RNA
ataaataaatat

SEQ ID NO: 2265 - RNA, 12 nt, synthetic construct
  source 1..12: mol_type = other RNA
aaataaaaaata

SEQ ID NO: 2266 - RNA, 12 nt, synthetic construct
  source 1..12: mol_type = other RNA
aataaatataaa

SEQ ID NO: 2267 - RNA, 12 nt, synthetic construct
  source 1..12: mol_type = other RNA
aatataaataaa

SEQ ID NO: 2268 - RNA, 12 nt, synthetic construct
  source 1..12: mol_type = other RNA
aaaaataatata

SEQ ID NO: 2269 - RNA, 12 nt, synthetic construct
  source 1..12: mol_type = other RNA
aaaaatatataa

SEQ ID NO: 2270 - RNA, 12 nt, synthetic construct
  source 1..12: mol_type = other RNA
aaaatatataaa

SEQ ID NO: 2271 - RNA, 12 nt, synthetic construct
  source 1..12: mol_type = other RNA
aataaaaatata

SEQ ID NO: 2272 - RNA, 12 nt, synthetic construct
  source 1..12: mol_type = other RNA
aaatatatatat

SEQ ID NO: 2273 - RNA, 12 nt, synthetic construct
  source 1..12: mol_type = other RNA
aaaaaatataat

SEQ ID NO: 2274 - RNA, 12 nt, synthetic construct
  source 1..12: mol_type = other RNA
aaataataaata

SEQ ID NO: 2275 - RNA, 12 nt, synthetic construct
  source 1..12: mol_type = other RNA
aaataaataata

SEQ ID NO: 2276 - RNA, 12 nt, synthetic construct
  source 1..12: mol_type = other RNA
aaataaaataat

SEQ ID NO: 2277 - RNA, 12 nt, synthetic construct
  source 1..12: mol_type = other RNA
aaatataaatac

SEQ ID NO: 2278 - RNA, 12 nt, synthetic construct
  source 1..12: mol_type = other RNA
aaaaaaaatatt

SEQ ID NO: 2279 - RNA, 12 nt, synthetic construct
  source 1..12: mol_type = other RNA
aaaataaatatt

SEQ ID NO: 2280 - RNA, 12 nt, synthetic construct
  source 1..12: mol_type = other RNA
taaatatatata

SEQ ID NO: 2281 - RNA, 12 nt, synthetic construct
  source 1..12: mol_type = other RNA
aaataaaaaaaa

SEQ ID NO: 2282 - RNA, 12 nt, synthetic construct
  source 1..12: mol_type = other RNA
aaataaatatag

SEQ ID NO: 2283 - RNA, 12 nt, synthetic construct
  source 1..12: mol_type = other RNA
aaataaataaaa

SEQ ID NO: 2284 - RNA, 12 nt, synthetic construct
  source 1..12: mol_type = other RNA
aaaaatatatat

SEQ ID NO: 2285 - RNA, 12 nt, synthetic construct
  source 1..12: mol_type = other RNA
aaaaaaatatac

SEQ ID NO: 2286 - RNA, 12 nt, synthetic construct
  source 1..12: mol_type = other RNA
aaaataaaataa

SEQ ID NO: 2287 - RNA, 12 nt, synthetic construct
  source 1..12: mol_type = other RNA
aaataatataaa

SEQ ID NO: 2288 - RNA, 12 nt, synthetic construct
  source 1..12: mol_type = other RNA
aaatataataaa

SEQ ID NO: 2289 - RNA, 12 nt, synthetic construct
  source 1..12: mol_type = other RNA
aaatataaaata

SEQ ID NO: 2290 - RNA, 12 nt, synthetic construct
  source 1..12: mol_type = other RNA
taaataaataat

SEQ ID NO: 2291 - RNA, 12 nt, synthetic construct
  source 1..12: mol_type = other RNA
taaaaaaatata

SEQ ID NO: 2292 - RNA, 12 nt, synthetic construct
  source 1..12: mol_type = other RNA
ataaaaaatata

SEQ ID NO: 2293 - RNA, 12 nt, synthetic construct
  source 1..12: mol_type = other RNA
aaaataaaatat

SEQ ID NO: 2294 - RNA, 12 nt, synthetic construct
  source 1..12: mol_type = other RNA
aaaaaaaaaaat

SEQ ID NO: 2295 - RNA, 12 nt, synthetic construct
  source 1..12: mol_type = other RNA
aaaaaaaaatac

SEQ ID NO: 2296 - RNA, 12 nt, synthetic construct
  source 1..12: mol_type = other RNA
aaaaaaataaat

SEQ ID NO: 2297 - RNA, 12 nt, synthetic construct
  source 1..12: mol_type = other RNA
taaatataaata

SEQ ID NO: 2298 - RNA, 12 nt, synthetic construct
  source 1..12: mol_type = other RNA
aaaaataaatac

SEQ ID NO: 2299 - RNA, 12 nt, synthetic construct
  source 1..12: mol_type = other RNA
aatataaataat

SEQ ID NO: 2300 - RNA, 12 nt, synthetic construct
  source 1..12: mol_type = other RNA
aataaatataat

SEQ ID NO: 2301 - RNA, 12 nt, synthetic construct
  source 1..12: mol_type = other RNA
aatatatatata

SEQ ID NO: 2302 - RNA, 12 nt, synthetic construct
  source 1..12: mol_type = other RNA
atataaatataa

SEQ ID NO: 2303 - RNA, 12 nt, synthetic construct
  source 1..12: mol_type = other RNA
aaaaaataataa

SEQ ID NO: 2304 - RNA, 12 nt, synthetic construct
  source 1..12: mol_type = other RNA
aaaaataataaa

SEQ ID NO: 2305 - RNA, 12 nt, synthetic construct
  source 1..12: mol_type = other RNA
aaaaataaaata

SEQ ID NO: 2306 - RNA, 12 nt, synthetic construct
  source 1..12: mol_type = other RNA
aaaataaaaata

SEQ ID NO: 2307 - RNA, 12 nt, synthetic construct
  source 1..12: mol_type = other RNA
atatataaataa

SEQ ID NO: 2308 - RNA, 12 nt, synthetic construct
  source 1..12: mol_type = other RNA
aataaaaaataa

SEQ ID NO: 2309 - RNA, 12 nt, synthetic construct
  source 1..12: mol_type = other RNA
aaatatatatac

SEQ ID NO: 2310 - RNA, 12 nt, synthetic construct
  source 1..12: mol_type = other RNA
gaaataaatata

SEQ ID NO: 2311 - RNA, 12 nt, synthetic construct
  source 1..12: mol_type = other RNA
aaaatatataat

SEQ ID NO: 2312 - RNA, 12 nt, synthetic construct
  source 1..12: mol_type = other RNA
caaataaatata

SEQ ID NO: 2313 - RNA, 12 nt, synthetic construct
  source 1..12: mol_type = other RNA
aaatataaaaaa

SEQ ID NO: 2314 - RNA, 12 nt, synthetic construct
  source 1..12: mol_type = other RNA
aaaaaataatat

SEQ ID NO: 2315 - RNA, 12 nt, synthetic construct
  source 1..12: mol_type = other RNA
aataaaaataaa

SEQ ID NO: 2316 - RNA, 12 nt, synthetic construct
  source 1..12: mol_type = other RNA
ataaataatata

SEQ ID NO: 2317 - RNA, 12 nt, synthetic construct
  source 1..12: mol_type = other RNA
ataataaatata

SEQ ID NO: 2318 - RNA, 12 nt, synthetic construct
  source 1..12: mol_type = other RNA
aaataaaatatt

SEQ ID NO: 2319 - RNA, 12 nt, synthetic construct
  source 1..12: mol_type = other RNA
atataaaatata

SEQ ID NO: 2320 - RNA, 12 nt, synthetic construct
  source 1..12: mol_type = other RNA
ataaatatataa

SEQ ID NO: 2321 - RNA, 12 nt, synthetic construct
  source 1..12: mol_type = other RNA
taaatatataaa

SEQ ID NO: 2322 - RNA, 12 nt, synthetic construct
  source 1..12: mol_type = other RNA
atataaatatat

SEQ ID NO: 2323 - RNA, 12 nt, synthetic construct
  source 1..12: mol_type = other RNA
tataaatatata

SEQ ID NO: 2324 - RNA, 12 nt, synthetic construct
  source 1..12: mol_type = other RNA
tatataaatata

SEQ ID NO: 2325 - RNA, 12 nt, synthetic construct
  source 1..12: mol_type = other RNA
aaatatataaat

SEQ ID NO: 2326 - RNA, 12 nt, synthetic construct
  source 1..12: mol_type = other RNA
aatatataaata

SEQ ID NO: 2327 - RNA, 12 nt, synthetic construct
  source 1..12: mol_type = other RNA
atatataaatat

SEQ ID NO: 2328 - RNA, 12 nt, synthetic construct
  source 1..12: mol_type = other RNA
aaaaaatatatt

SEQ ID NO: 2329 - RNA, 12 nt, synthetic construct
  source 1..12: mol_type = other RNA
aataaaaaatat

SEQ ID NO: 2330 - RNA, 12 nt, synthetic construct
  source 1..12: mol_type = other RNA
aaaaatatatac

SEQ ID NO: 2331 - RNA, 12 nt, synthetic construct
  source 1..12: mol_type = other RNA
taaataaatatt

SEQ ID NO: 2332 - RNA, 12 nt, synthetic construct
  source 1..12: mol_type = other RNA
aaaaaaaataag

SEQ ID NO: 2333 - RNA, 12 nt, synthetic construct
  source 1..12: mol_type = other RNA
aaaaaaataata

SEQ ID NO: 2334 - RNA, 12 nt, synthetic construct
  source 1..12: mol_type = other RNA
aaaataaataag

SEQ ID NO: 2335 - RNA, 12 nt, synthetic construct
  source 1..12: mol_type = other RNA
aaatataataat

SEQ ID NO: 2336 - RNA, 12 nt, synthetic construct
  source 1..12: mol_type = other RNA
aaataatataat

SEQ ID NO: 2337 - RNA, 12 nt, synthetic construct
  source 1..12: mol_type = other RNA
aaaaatataaat

SEQ ID NO: 2338 - RNA, 12 nt, synthetic construct
  source 1..12: mol_type = other RNA
taaaaatatata

SEQ ID NO: 2339 - RNA, 12 nt, synthetic construct
  source 1..12: mol_type = other RNA
caaaaaaatata

SEQ ID NO: 2340 - RNA, 12 nt, synthetic construct
  source 1..12: mol_type = other RNA
taaaaaaaataa

SEQ ID NO: 2341 - RNA, 12 nt, synthetic construct
  source 1..12: mol_type = other RNA
aaataaataaac

SEQ ID NO: 2342 - RNA, 12 nt, synthetic construct
  source 1..12: mol_type = other RNA
aataataaataa

SEQ ID NO: 2343 - RNA, 12 nt, synthetic construct
  source 1..12: mol_type = other RNA
aataaataataa

SEQ ID NO: 2344 - RNA, 12 nt, synthetic construct
  source 1..12: mol_type = other RNA
taaaataaataa

SEQ ID NO: 2345 - RNA, 12 nt, synthetic construct
  source 1..12: mol_type = other RNA
taaataaaataa

SEQ ID NO: 2346 - RNA, 12 nt, synthetic construct
  source 1..12: mol_type = other RNA
ataaaatatata

SEQ ID NO: 2347 - RNA, 12 nt, synthetic construct
  source 1..12: mol_type = other RNA
aaataaataaag

SEQ ID NO: 2348 - RNA, 12 nt, synthetic construct
  source 1..12: mol_type = other RNA
aaaaaaatatag

SEQ ID NO: 2349 - RNA, 12 nt, synthetic construct
  source 1..12: mol_type = other RNA
ataaatatatat

SEQ ID NO: 2350 - RNA, 12 nt, synthetic construct
  source 1..12: mol_type = other RNA
aaaaataaaaaa

SEQ ID NO: 2351 - RNA, 12 nt, synthetic construct
  source 1..12: mol_type = other RNA
aaaaaaataaaa

SEQ ID NO: 2352 - RNA, 12 nt, synthetic construct
  source 1..12: mol_type = other RNA
aaaataaaaaaa

SEQ ID NO: 2353 - RNA, 12 nt, synthetic construct
  source 1..12: mol_type = other RNA
ataaaaaaataa

SEQ ID NO: 2354 - RNA, 12 nt, synthetic construct
  source 1..12: mol_type = other RNA
aataaaaaaata

SEQ ID NO: 2355 - RNA, 12 nt, synthetic construct
  source 1..12: mol_type = other RNA
taaaaaaataaa

SEQ ID NO: 2356 - RNA, 12 nt, synthetic construct
  source 1..12: mol_type = other RNA
aaaaaataaaaa

SEQ ID NO: 2357 - RNA, 12 nt, synthetic construct
  source 1..12: mol_type = other RNA
aaataaaaaaat

SEQ ID NO: 2358 - RNA, 12 nt, synthetic construct
  source 1..12: mol_type = other RNA
aaataaaaatac

SEQ ID NO: 2359 - RNA, 12 nt, synthetic construct
  source 1..12: mol_type = other RNA
aatatatataaa

SEQ ID NO: 2360 - RNA, 12 nt, synthetic construct
  source 1..12: mol_type = other RNA
ataaaaaataaa

SEQ ID NO: 2361 - RNA, 12 nt, synthetic construct
  source 1..12: mol_type = other RNA
aaaataatataa

SEQ ID NO: 2362 - RNA, 12 nt, synthetic construct
  source 1..12: mol_type = other RNA
aaaatataataa

SEQ ID NO: 2363 - RNA, 12 nt, synthetic construct
  source 1..12: mol_type = other RNA
aatataaatatt

SEQ ID NO: 2364 - RNA, 12 nt, synthetic construct
  source 1..12: mol_type = other RNA
taaaaaaaatat

SEQ ID NO: 2365 - RNA, 12 nt, synthetic construct
  source 1..12: mol_type = other RNA
aataataaatat

SEQ ID NO: 2366 - RNA, 12 nt, synthetic construct
  source 1..12: mol_type = other RNA
aataaataatat

SEQ ID NO: 2367 - RNA, 12 nt, synthetic construct
  source 1..12: mol_type = other RNA
taaaataaatat

SEQ ID NO: 2368 - RNA, 12 nt, synthetic construct
  source 1..12: mol_type = other RNA
taaataaaatat

SEQ ID NO: 2369 - RNA, 12 nt, synthetic construct
  source 1..12: mol_type = other RNA
taataaatataa

SEQ ID NO: 2370 - RNA, 12 nt, synthetic construct
  source 1..12: mol_type = other RNA
taatataaataa

SEQ ID NO: 2371 - RNA, 12 nt, synthetic construct
  source 1..12: mol_type = other RNA
tataaataaata

SEQ ID NO: 2372 - RNA, 12 nt, synthetic construct
  source 1..12: mol_type = other RNA
ataaaaaaatat

SEQ ID NO: 2373 - RNA, 12 nt, synthetic construct
  source 1..12: mol_type = other RNA
aatataaaataa

SEQ ID NO: 2374 - RNA, 12 nt, synthetic construct
  source 1..12: mol_type = other RNA
aataaaatataa

SEQ ID NO: 2375 - RNA, 12 nt, synthetic construct
  source 1..12: mol_type = other RNA
aaaatataatat

SEQ ID NO: 2376 - RNA, 12 nt, synthetic construct
  source 1..12: mol_type = other RNA
aataaatatatt

SEQ ID NO: 2377 - RNA, 12 nt, synthetic construct
  source 1..12: mol_type = other RNA
aaatatataata

SEQ ID NO: 2378 - RNA, 12 nt, synthetic construct
  source 1..12: mol_type = other RNA
ataaataaatac

SEQ ID NO: 2379 - RNA, 12 nt, synthetic construct
  source 1..12: mol_type = other RNA
aaaaataataat

SEQ ID NO: 2380 - RNA, 12 nt, synthetic construct
  source 1..12: mol_type = other RNA
taatataaatat

SEQ ID NO: 2381 - RNA, 12 nt, synthetic construct
  source 1..12: mol_type = other RNA
aatataaaatat

SEQ ID NO: 2382 - RNA, 12 nt, synthetic construct
  source 1..12: mol_type = other RNA
tataaatataaa

SEQ ID NO: 2383 - RNA, 12 nt, synthetic construct
  source 1..12: mol_type = other RNA
aaatatataaaa

SEQ ID NO: 2384 - RNA, 12 nt, synthetic construct
  source 1..12: mol_type = other RNA
aaaataatatat

SEQ ID NO: 2385 - RNA, 12 nt, synthetic construct
  source 1..12: mol_type = other RNA
taaaaaaaaata

SEQ ID NO: 2386 - RNA, 12 nt, synthetic construct
  source 1..12: mol_type = other RNA
taaataaaaata

SEQ ID NO: 2387 - RNA, 12 nt, synthetic construct
  source 1..12: mol_type = other RNA
taaaaataaata

SEQ ID NO: 2388 - RNA, 12 nt, synthetic construct
  source 1..12: mol_type = other RNA
gaaataaataaa

SEQ ID NO: 2389 - RNA, 12 nt, synthetic construct
  source 1..12: mol_type = other RNA
caaataaataaa

SEQ ID NO: 2390 - RNA, 12 nt, synthetic construct
  source 1..12: mol_type = other RNA
aataaaaataat

SEQ ID NO: 2391 - RNA, 12 nt, synthetic construct
  source 1..12: mol_type = other RNA
ataaaaaaaata

SEQ ID NO: 2392 - RNA, 12 nt, synthetic construct
  source 1..12: mol_type = other RNA
atataaaaataa

SEQ ID NO: 2393 - RNA, 12 nt, synthetic construct
  source 1..12: mol_type = other RNA
taataaaatata

SEQ ID NO: 2394 - RNA, 12 nt, synthetic construct
  source 1..12: mol_type = other RNA
atataaatatac

SEQ ID NO: 2395 - RNA, 12 nt, synthetic construct
  source 1..12: mol_type = other RNA
aaataaataatt

SEQ ID NO: 2396 - RNA, 12 nt, synthetic construct
  source 1..12: mol_type = other RNA
ataataaataaa

SEQ ID NO: 2397 - RNA, 12 nt, synthetic construct
  source 1..12: mol_type = other RNA
ataaataataaa

SEQ ID NO: 2398 - RNA, 12 nt, synthetic construct
  source 1..12: mol_type = other RNA
ataaaataaata

SEQ ID NO: 2399 - RNA, 12 nt, synthetic construct
  source 1..12: mol_type = other RNA
ataaataaaata

SEQ ID NO: 2400 - RNA, 12 nt, synthetic construct
  source 1..12: mol_type = other RNA
aaaatatatatt

SEQ ID NO: 2401 - RNA, 12 nt, synthetic construct
  source 1..12: mol_type = other RNA
taataaatatat

SEQ ID NO: 2402 - RNA, 12 nt, synthetic construct
  source 1..12: mol_type = other RNA
aaaaaatataag

SEQ ID NO: 2403 - RNA, 12 nt, synthetic construct
  source 1..12: mol_type = other RNA
aataaaatatat

SEQ ID NO: 2404 - RNA, 12 nt, synthetic construct
  source 1..12: mol_type = other RNA
taaatatataat

SEQ ID NO: 2405 - RNA, 12 nt, synthetic construct
  source 1..12: mol_type = other RNA
aaaaatataata

SEQ ID NO: 2406 - RNA, 12 nt, synthetic construct
  source 1..12: mol_type = other RNA
atataaaataaa

SEQ ID NO: 2407 - RNA, 12 nt, synthetic construct
  source 1..12: mol_type = other RNA
aataaaaaaaaa

SEQ ID NO: 2408 - RNA, 12 nt, synthetic construct
  source 1..12: mol_type = other RNA
aaatatatatag

SEQ ID NO: 2409 - RNA, 12 nt, synthetic construct
  source 1..12: mol_type = other RNA
tatataaataaa

SEQ ID NO: 2410 - RNA, 12 nt, synthetic construct
  source 1..12: mol_type = other RNA
aataaataaaaa

SEQ ID NO: 2411 - RNA, 12 nt, synthetic construct
  source 1..12: mol_type = other RNA
aaataataataa

SEQ ID NO: 2412 - RNA, 12 nt, synthetic construct
  source 1..12: mol_type = other RNA
taaaaaatataa

SEQ ID NO: 2413 - RNA, 12 nt, synthetic construct
  source 1..12: mol_type = other RNA
aaataaaataag

SEQ ID NO: 2414 - RNA, 12 nt, synthetic construct
  source 1..12: mol_type = other RNA
aaatataaatag

SEQ ID NO: 2415 - RNA, 12 nt, synthetic construct
  source 1..12: mol_type = other RNA
aaaaatataaaa

SEQ ID NO: 2416 - RNA, 12 nt, synthetic construct
  source 1..12: mol_type = other RNA
ataaaaatataa

SEQ ID NO: 2417 - RNA, 12 nt, synthetic construct
  source 1..12: mol_type = other RNA
aatataaaaata

SEQ ID NO: 2418 - RNA, 12 nt, synthetic construct
  source 1..12: mol_type = other RNA
aaaatataaaaa

SEQ ID NO: 2419 - RNA, 12 nt, synthetic construct
  source 1..12: mol_type = other RNA
taaaaatataaa

SEQ ID NO: 2420 - RNA, 12 nt, synthetic construct
  source 1..12: mol_type = other RNA
atataaaaatat

SEQ ID NO: 2421 - RNA, 12 nt, synthetic construct
  source 1..12: mol_type = other RNA
tataaaaatata

SEQ ID NO: 2422 - RNA, 12 nt, synthetic construct
  source 1..12: mol_type = other RNA
aaatataaaaat

SEQ ID NO: 2423 - RNA, 12 nt, synthetic construct
  source 1..12: mol_type = other RNA
aaatataatatt

SEQ ID NO: 2424 - RNA, 12 nt, synthetic construct
  source 1..12: mol_type = other RNA
ataaaatataaa

SEQ ID NO: 2425 - RNA, 12 nt, synthetic construct
  source 1..12: mol_type = other RNA
aaaaaaaatatc

SEQ ID NO: 2426 - RNA, 13 nt, synthetic construct
  source 1..13: mol_type = other RNA
aaatataaatata

SEQ ID NO: 2427 - RNA, 13 nt, synthetic construct
  source 1..13: mol_type = other RNA
aaataaatatata

SEQ ID NO: 2428 - RNA, 13 nt, synthetic construct
  source 1..13: mol_type = other RNA
aaaaaaaaatata

SEQ ID NO: 2429 - RNA, 13 nt, synthetic construct
  source 1..13: mol_type = other RNA
aaaaataaatata

SEQ ID NO: 2430 - RNA, 13 nt, synthetic construct
  source 1..13: mol_type = other RNA
aaataaataaata

SEQ ID NO: 2431 - RNA, 13 nt, synthetic construct
  source 1..13: mol_type = other RNA
aaatataaataaa

SEQ ID NO: 2432 - RNA, 13 nt, synthetic construct
  source 1..13: mol_type = other RNA
aaataaatataaa

SEQ ID NO: 2433 - RNA, 13 nt, synthetic construct
  source 1..13: mol_type = other RNA
aaataaaaatata

SEQ ID NO: 2434 - RNA, 13 nt, synthetic construct
  source 1..13: mol_type = other RNA
aaaaaaatatata

SEQ ID NO: 2435 - RNA, 13 nt, synthetic construct
  source 1..13: mol_type = other RNA
aaaaaaaaaataa

SEQ ID NO: 2436 - RNA, 13 nt, synthetic construct
  source 1..13: mol_type = other RNA
aaaaaataaataa

SEQ ID NO: 2437 - RNA, 13 nt, synthetic construct
  source 1..13: mol_type = other RNA
aaaaaaaaataaa

SEQ ID NO: 2438 - RNA, 13 nt, synthetic construct
  source 1..13: mol_type = other RNA
aaaaataaataaa

SEQ ID NO: 2439 - RNA, 13 nt, synthetic construct
  source 1..13: mol_type = other RNA
aaaaaaaaaatat

SEQ ID NO: 2440 - RNA, 13 nt, synthetic construct
  source 1..13: mol_type = other RNA
aaaaaataaatat

SEQ ID NO: 2441 - RNA, 13 nt, synthetic construct
  source 1..13: mol_type = other RNA
ataaataaatata

SEQ ID NO: 2442 - RNA, 13 nt, synthetic construct
  source 1..13: mol_type = other RNA
aaaaaaaaaaata

SEQ ID NO: 2443 - RNA, 13 nt, synthetic construct
  source 1..13: mol_type = other RNA
aaaaaaataaata

SEQ ID NO: 2444 - RNA, 13 nt, synthetic construct
  source 1..13: mol_type = other RNA
aaataaatataat

SEQ ID NO: 2445 - RNA, 13 nt, synthetic construct
  source 1..13: mol_type = other RNA
aaatataaataat

SEQ ID NO: 2446 - RNA, 13 nt, synthetic construct
  source 1..13: mol_type = other RNA
aaatatatatata

SEQ ID NO: 2447 - RNA, 13 nt, synthetic construct
  source 1..13: mol_type = other RNA
aataaataaataa

SEQ ID NO: 2448 - RNA, 13 nt, synthetic construct
  source 1..13: mol_type = other RNA
aaaaaaaatataa

SEQ ID NO: 2449 - RNA, 13 nt, synthetic construct
  source 1..13: mol_type = other RNA
aaaatataaataa

SEQ ID NO: 2450 - RNA, 13 nt, synthetic construct
  source 1..13: mol_type = other RNA
aaaataaatataa

SEQ ID NO: 2451 - RNA, 13 nt, synthetic construct
  source 1..13: mol_type = other RNA
aaaaaaatataaa

SEQ ID NO: 2452 - RNA, 13 nt, synthetic construct
  source 1..13: mol_type = other RNA
aataaataaatat

SEQ ID NO: 2453 - RNA, 13 nt, synthetic construct
  source 1..13: mol_type = other RNA
aaataaaaaataa

SEQ ID NO: 2454 - RNA, 13 nt, synthetic construct
  source 1..13: mol_type = other RNA
aaaaatatatata

SEQ ID NO: 2455 - RNA, 13 nt, synthetic construct
  source 1..13: mol_type = other RNA
aaataaaaataaa

SEQ ID NO: 2456 - RNA, 13 nt, synthetic construct
  source 1..13: mol_type = other RNA
aaaatataaatat

SEQ ID NO: 2457 - RNA, 13 nt, synthetic construct
  source 1..13: mol_type = other RNA
aaatatataaata

SEQ ID NO: 2458 - RNA, 13 nt, synthetic construct
  source 1..13: mol_type = other RNA
aaaaaaaaataat

SEQ ID NO: 2459 - RNA, 13 nt, synthetic construct
  source 1..13: mol_type = other RNA
aaataaaaaatat

SEQ ID NO: 2460 - RNA, 13 nt, synthetic construct
  source 1..13: mol_type = other RNA
aaaaataaataat

SEQ ID NO: 2461 - RNA, 13 nt, synthetic construct
  source 1..13: mol_type = other RNA
aaaataaaatata

SEQ ID NO: 2462 - RNA, 13 nt, synthetic construct
  source 1..13: mol_type = other RNA
aaaaaaaatatat

SEQ ID NO: 2463 - RNA, 13 nt, synthetic construct
  source 1..13: mol_type = other RNA
aaaaaaaaaaaaa

SEQ ID NO: 2464 - RNA, 13 nt, synthetic construct
  source 1..13: mol_type = other RNA
aaaataaatatat

SEQ ID NO: 2465 - RNA, 13 nt, synthetic construct
  source 1..13: mol_type = other RNA
ataaataaataaa

SEQ ID NO: 2466 - RNA, 13 nt, synthetic construct
  source 1..13: mol_type = other RNA
aaaaatataaata

SEQ ID NO: 2467 - RNA, 13 nt, synthetic construct
  source 1..13: mol_type = other RNA
aaataataaataa

SEQ ID NO: 2468 - RNA, 13 nt, synthetic construct
  source 1..13: mol_type = other RNA
aaataaataataa

SEQ ID NO: 2469 - RNA, 13 nt, synthetic construct
  source 1..13: mol_type = other RNA
aaataaaaaaata

SEQ ID NO: 2470 - RNA, 13 nt, synthetic construct
  source 1..13: mol_type = other RNA
aaatatatataaa

SEQ ID NO: 2471 - RNA, 13 nt, synthetic construct
  source 1..13: mol_type = other RNA
aaatataaatatt

SEQ ID NO: 2472 - RNA, 13 nt, synthetic construct
  source 1..13: mol_type = other RNA
aaataataaatat

SEQ ID NO: 2473 - RNA, 13 nt, synthetic construct
  source 1..13: mol_type = other RNA
aaataaataatat

SEQ ID NO: 2474 - RNA, 13 nt, synthetic construct
  source 1..13: mol_type = other RNA
aaaaaataatata

SEQ ID NO: 2475 - RNA, 13 nt, synthetic construct
  source 1..13: mol_type = other RNA
aaataaaatataa

SEQ ID NO: 2476 - RNA, 13 nt, synthetic construct
  source 1..13: mol_type = other RNA
aaatataaaataa

SEQ ID NO: 2477 - RNA, 13 nt, synthetic construct
  source 1..13: mol_type = other RNA
aaataaatatatt

SEQ ID NO: 2478 - RNA, 13 nt, synthetic construct
  source 1..13: mol_type = other RNA
aaaaaatatataa

SEQ ID NO: 2479 - RNA, 13 nt, synthetic construct
  source 1..13: mol_type = other RNA
atatataaatata

SEQ ID NO: 2480 - RNA, 13 nt, synthetic construct
  source 1..13: mol_type = other RNA
atataaatatata

SEQ ID NO: 2481 - RNA, 13 nt, synthetic construct
  source 1..13: mol_type = other RNA
aataaaaaatata

SEQ ID NO: 2482 - RNA, 13 nt, synthetic construct
  source 1..13: mol_type = other RNA
aaaaatatataaa

SEQ ID NO: 2483 - RNA, 13 nt, synthetic construct
  source 1..13: mol_type = other RNA
aaaaaaatataat

SEQ ID NO: 2484 - RNA, 13 nt, synthetic construct
  source 1..13: mol_type = other RNA
aaatataaaatat

SEQ ID NO: 2485 - RNA, 13 nt, synthetic construct
  source 1..13: mol_type = other RNA
taaataaatataa

SEQ ID NO: 2486 - RNA, 13 nt, synthetic construct
  source 1..13: mol_type = other RNA
taaatataaataa

SEQ ID NO: 2487 - RNA, 13 nt, synthetic construct
  source 1..13: mol_type = other RNA
aaataaaaataat

SEQ ID NO: 2488 - RNA, 13 nt, synthetic construct
  source 1..13: mol_type = other RNA
aaaaaaaaatatt

SEQ ID NO: 2489 - RNA, 13 nt, synthetic construct
  source 1..13: mol_type = other RNA
aaaaataaatatt

SEQ ID NO: 2490 - RNA, 13 nt, synthetic construct
  source 1..13: mol_type = other RNA
aaataaaatatat

SEQ ID NO: 2491 - RNA, 13 nt, synthetic construct
  source 1..13: mol_type = other RNA
aaataaaaaaaaa

SEQ ID NO: 2492 - RNA, 13 nt, synthetic construct
  source 1..13: mol_type = other RNA
aaataaataaaaa

SEQ ID NO: 2493 - RNA, 13 nt, synthetic construct
  source 1..13: mol_type = other RNA
aaaaaatatatat

SEQ ID NO: 2494 - RNA, 13 nt, synthetic construct
  source 1..13: mol_type = other RNA
ataaatatatata

SEQ ID NO: 2495 - RNA, 13 nt, synthetic construct
  source 1..13: mol_type = other RNA
aaaaaaaatatac

SEQ ID NO: 2496 - RNA, 13 nt, synthetic construct
  source 1..13: mol_type = other RNA
taaatataaatat

SEQ ID NO: 2497 - RNA, 13 nt, synthetic construct
  source 1..13: mol_type = other RNA
aaaaataaaataa

SEQ ID NO: 2498 - RNA, 13 nt, synthetic construct
  source 1..13: mol_type = other RNA
aaaataaaaataa

SEQ ID NO: 2499 - RNA, 13 nt, synthetic construct
  source 1..13: mol_type = other RNA
aaaataaatatac

SEQ ID NO: 2500 - RNA, 13 nt, synthetic construct
  source 1..13: mol_type = other RNA
aatataaatataa

SEQ ID NO: 2501 - RNA, 13 nt, synthetic construct
  source 1..13: mol_type = other RNA
aaatataaaaata

SEQ ID NO: 2502 - RNA, 13 nt, synthetic construct
  source 1..13: mol_type = other RNA
aaaataaaataaa

SEQ ID NO: 2503 - RNA, 13 nt, synthetic construct
  source 1..13: mol_type = other RNA
taaaaaaaatata

SEQ ID NO: 2504 - RNA, 13 nt, synthetic construct
  source 1..13: mol_type = other RNA
aataataaatata

SEQ ID NO: 2505 - RNA, 13 nt, synthetic construct
  source 1..13: mol_type = other RNA
aataaataatata

SEQ ID NO: 2506 - RNA, 13 nt, synthetic construct
  source 1..13: mol_type = other RNA
taaaataaatata

SEQ ID NO: 2507 - RNA, 13 nt, synthetic construct
  source 1..13: mol_type = other RNA
taaataaaatata

SEQ ID NO: 2508 - RNA, 13 nt, synthetic construct
  source 1..13: mol_type = other RNA
ataaataaataat

SEQ ID NO: 2509 - RNA, 13 nt, synthetic construct
  source 1..13: mol_type = other RNA
taaataaatatat

SEQ ID NO: 2510 - RNA, 13 nt, synthetic construct
  source 1..13: mol_type = other RNA
ataaaaaaatata

SEQ ID NO: 2511 - RNA, 13 nt, synthetic construct
  source 1..13: mol_type = other RNA
atataaataaata

SEQ ID NO: 2512 - RNA, 13 nt, synthetic construct
  source 1..13: mol_type = other RNA
aaaaataaaatat

SEQ ID NO: 2513 - RNA, 13 nt, synthetic construct
  source 1..13: mol_type = other RNA
aaaataaaaatat

SEQ ID NO: 2514 - RNA, 13 nt, synthetic construct
  source 1..13: mol_type = other RNA
aataaatatataa

SEQ ID NO: 2515 - RNA, 13 nt, synthetic construct
  source 1..13: mol_type = other RNA
aatatataaataa

SEQ ID NO: 2516 - RNA, 13 nt, synthetic construct
  source 1..13: mol_type = other RNA
aaaatataatata

SEQ ID NO: 2517 - RNA, 13 nt, synthetic construct
  source 1..13: mol_type = other RNA
aaaaaaaaaaaat

SEQ ID NO: 2518 - RNA, 13 nt, synthetic construct
  source 1..13: mol_type = other RNA
aaaaaaaaaatac

SEQ ID NO: 2519 - RNA, 13 nt, synthetic construct
  source 1..13: mol_type = other RNA
aaaaaaaataaat

SEQ ID NO: 2520 - RNA, 13 nt, synthetic construct
  source 1..13: mol_type = other RNA
aaaaaataaatac

SEQ ID NO: 2521 - RNA, 13 nt, synthetic construct
  source 1..13: mol_type = other RNA
aaaataaataaat

SEQ ID NO: 2522 - RNA, 13 nt, synthetic construct
  source 1..13: mol_type = other RNA
aaatatatataat

SEQ ID NO: 2523 - RNA, 13 nt, synthetic construct
  source 1..13: mol_type = other RNA
taatataaatata

SEQ ID NO: 2524 - RNA, 13 nt, synthetic construct
  source 1..13: mol_type = other RNA
ataaatataaata

SEQ ID NO: 2525 - RNA, 13 nt, synthetic construct
  source 1..13: mol_type = other RNA
aatataaaatata

SEQ ID NO: 2526 - RNA, 13 nt, synthetic construct
  source 1..13: mol_type = other RNA
aatataaatatat

SEQ ID NO: 2527 - RNA, 13 nt, synthetic construct
  source 1..13: mol_type = other RNA
aatatataaatat

SEQ ID NO: 2528 - RNA, 13 nt, synthetic construct
  source 1..13: mol_type = other RNA
atataaatataaa

SEQ ID NO: 2529 - RNA, 13 nt, synthetic construct
  source 1..13: mol_type = other RNA
aaaataatatata

SEQ ID NO: 2530 - RNA, 13 nt, synthetic construct
  source 1..13: mol_type = other RNA
aaaaaaataataa

SEQ ID NO: 2531 - RNA, 13 nt, synthetic construct
  source 1..13: mol_type = other RNA
aaaatatatataa

SEQ ID NO: 2532 - RNA, 13 nt, synthetic construct
  source 1..13: mol_type = other RNA
aaaaaataataaa

SEQ ID NO: 2533 - RNA, 13 nt, synthetic construct
  source 1..13: mol_type = other RNA
aaaaataaaaata

SEQ ID NO: 2534 - RNA, 13 nt, synthetic construct
  source 1..13: mol_type = other RNA
aaaaaataaaata

SEQ ID NO: 2535 - RNA, 13 nt, synthetic construct
  source 1..13: mol_type = other RNA
aaaataaaaaata

SEQ ID NO: 2536 - RNA, 13 nt, synthetic construct
  source 1..13: mol_type = other RNA
aaatataaataag

SEQ ID NO: 2537 - RNA, 13 nt, synthetic construct
  source 1..13: mol_type = other RNA
aaataaatataag

SEQ ID NO: 2538 - RNA, 13 nt, synthetic construct
  source 1..13: mol_type = other RNA
taataaatatata

SEQ ID NO: 2539 - RNA, 13 nt, synthetic construct
  source 1..13: mol_type = other RNA
aataaaatatata

SEQ ID NO: 2540 - RNA, 13 nt, synthetic construct
  source 1..13: mol_type = other RNA
aataaatatatat

SEQ ID NO: 2541 - RNA, 13 nt, synthetic construct
  source 1..13: mol_type = other RNA
aataaaaaaataa

SEQ ID NO: 2542 - RNA, 13 nt, synthetic construct
  source 1..13: mol_type = other RNA
atatataaataaa

SEQ ID NO: 2543 - RNA, 13 nt, synthetic construct
  source 1..13: mol_type = other RNA
aaaaatatataat

SEQ ID NO: 2544 - RNA, 13 nt, synthetic construct
  source 1..13: mol_type = other RNA
aaatataaaaaaa

SEQ ID NO: 2545 - RNA, 13 nt, synthetic construct
  source 1..13: mol_type = other RNA
aaaaaaataatat

SEQ ID NO: 2546 - RNA, 13 nt, synthetic construct
  source 1..13: mol_type = other RNA
aataaaaaataaa

SEQ ID NO: 2547 - RNA, 13 nt, synthetic construct
  source 1..13: mol_type = other RNA
aaataaaaatatt

SEQ ID NO: 2548 - RNA, 13 nt, synthetic construct
  source 1..13: mol_type = other RNA
atataaaaatata

SEQ ID NO: 2549 - RNA, 13 nt, synthetic construct
  source 1..13: mol_type = other RNA
aaatataatataa

SEQ ID NO: 2550 - RNA, 13 nt, synthetic construct
  source 1..13: mol_type = other RNA
aaaaaaatatatt

SEQ ID NO: 2551 - RNA, 13 nt, synthetic construct
  source 1..13: mol_type = other RNA
tataaataaataa

SEQ ID NO: 2552 - RNA, 13 nt, synthetic construct
  source 1..13: mol_type = other RNA
aataaaaaaatat

SEQ ID NO: 2553 - RNA, 13 nt, synthetic construct
  source 1..13: mol_type = other RNA
ataaatatataaa

SEQ ID NO: 2554 - RNA, 13 nt, synthetic construct
  source 1..13: mol_type = other RNA
aaataataatata

SEQ ID NO: 2555 - RNA, 13 nt, synthetic construct
  source 1..13: mol_type = other RNA
aaataaaatatac

SEQ ID NO: 2556 - RNA, 13 nt, synthetic construct
  source 1..13: mol_type = other RNA
aaaatatatatat

SEQ ID NO: 2557 - RNA, 13 nt, synthetic construct
  source 1..13: mol_type = other RNA
aaaaaatatatac

SEQ ID NO: 2558 - RNA, 13 nt, synthetic construct
  source 1..13: mol_type = other RNA
aaatatataataa

SEQ ID NO: 2559 - RNA, 13 nt, synthetic construct
  source 1..13: mol_type = other RNA
aaataatatataa

SEQ ID NO: 2560 - RNA, 13 nt, synthetic construct
  source 1..13: mol_type = other RNA
aataaataaatac

SEQ ID NO: 2561 - RNA, 13 nt, synthetic construct
  source 1..13: mol_type = other RNA
aaaaaaaaataag

SEQ ID NO: 2562 - RNA, 13 nt, synthetic construct
  source 1..13: mol_type = other RNA
aaaaaaaataata

SEQ ID NO: 2563 - RNA, 13 nt, synthetic construct
  source 1..13: mol_type = other RNA
tataaataaatat

SEQ ID NO: 2564 - RNA, 13 nt, synthetic construct
  source 1..13: mol_type = other RNA
aaaaataaataag

SEQ ID NO: 2565 - RNA, 13 nt, synthetic construct
  source 1..13: mol_type = other RNA
aaaataataaata

SEQ ID NO: 2566 - RNA, 13 nt, synthetic construct
  source 1..13: mol_type = other RNA
aaaataaataata

SEQ ID NO: 2567 - RNA, 13 nt, synthetic construct
  source 1..13: mol_type = other RNA
ataaataaatatt

SEQ ID NO: 2568 - RNA, 13 nt, synthetic construct
  source 1..13: mol_type = other RNA
aaaaaatataaat

SEQ ID NO: 2569 - RNA, 13 nt, synthetic construct
  source 1..13: mol_type = other RNA
taaaaaatatata

SEQ ID NO: 2570 - RNA, 13 nt, synthetic construct
  source 1..13: mol_type = other RNA
aaaataaaataat

SEQ ID NO: 2571 - RNA, 13 nt, synthetic construct
  source 1..13: mol_type = other RNA
caaaaaaaatata

SEQ ID NO: 2572 - RNA, 13 nt, synthetic construct
  source 1..13: mol_type = other RNA
aaaatataaatac

SEQ ID NO: 2573 - RNA, 13 nt, synthetic construct
  source 1..13: mol_type = other RNA
taaaaaaaaataa

SEQ ID NO: 2574 - RNA, 13 nt, synthetic construct
  source 1..13: mol_type = other RNA
caaaataaatata

SEQ ID NO: 2575 - RNA, 13 nt, synthetic construct
  source 1..13: mol_type = other RNA
aaataaataaatt

SEQ ID NO: 2576 - RNA, 13 nt, synthetic construct
  source 1..13: mol_type = other RNA
taaaaataaataa

SEQ ID NO: 2577 - RNA, 13 nt, synthetic construct
  source 1..13: mol_type = other RNA
taaataaaaataa

SEQ ID NO: 2578 - RNA, 13 nt, synthetic construct
  source 1..13: mol_type = other RNA
ataaaaatatata

SEQ ID NO: 2579 - RNA, 13 nt, synthetic construct
  source 1..13: mol_type = other RNA
taaataaatatac

SEQ ID NO: 2580 - RNA, 13 nt, synthetic construct
  source 1..13: mol_type = other RNA
aaatataatatat

SEQ ID NO: 2581 - RNA, 13 nt, synthetic construct
  source 1..13: mol_type = other RNA
aaatatataatat

SEQ ID NO: 2582 - RNA, 13 nt, synthetic construct
  source 1..13: mol_type = other RNA
aaaaaaaatatag

SEQ ID NO: 2583 - RNA, 13 nt, synthetic construct
  source 1..13: mol_type = other RNA
aaataaaaaaaat

SEQ ID NO: 2584 - RNA, 13 nt, synthetic construct
  source 1..13: mol_type = other RNA
taaaaaaaataaa

SEQ ID NO: 2585 - RNA, 13 nt, synthetic construct
  source 1..13: mol_type = other RNA
ataaaaaaaataa

SEQ ID NO: 2586 - RNA, 13 nt, synthetic construct
  source 1..13: mol_type = other RNA
aaaaataaaaaaa

SEQ ID NO: 2587 - RNA, 13 nt, synthetic construct
  source 1..13: mol_type = other RNA
taataaataaata

SEQ ID NO: 2588 - RNA, 13 nt, synthetic construct
  source 1..13: mol_type = other RNA
aaaaaaaataaaa

SEQ ID NO: 2589 - RNA, 13 nt, synthetic construct
  source 1..13: mol_type = other RNA
aataaaaaaaata

SEQ ID NO: 2590 - RNA, 13 nt, synthetic construct
  source 1..13: mol_type = other RNA
aaaaaaataaaaa

SEQ ID NO: 2591 - RNA, 13 nt, synthetic construct
  source 1..13: mol_type = other RNA
aaaaaataaaaaa

SEQ ID NO: 2592 - RNA, 13 nt, synthetic construct
  source 1..13: mol_type = other RNA
aaaataaaaaaaa

SEQ ID NO: 2593 - RNA, 13 nt, synthetic construct
  source 1..13: mol_type = other RNA
aaaataaatatag

SEQ ID NO: 2594 - RNA, 13 nt, synthetic construct
  source 1..13: mol_type = other RNA
aataataaataaa

SEQ ID NO: 2595 - RNA, 13 nt, synthetic construct
  source 1..13: mol_type = other RNA
aataaataataaa

SEQ ID NO: 2596 - RNA, 13 nt, synthetic construct
  source 1..13: mol_type = other RNA
taaaataaataaa

SEQ ID NO: 2597 - RNA, 13 nt, synthetic construct
  source 1..13: mol_type = other RNA
ataaataaaataa

SEQ ID NO: 2598 - RNA, 13 nt, synthetic construct
  source 1..13: mol_type = other RNA
aaaataaataaaa

SEQ ID NO: 2599 - RNA, 13 nt, synthetic construct
  source 1..13: mol_type = other RNA
aaataaaaaatac

SEQ ID NO: 2600 - RNA, 13 nt, synthetic construct
  source 1..13: mol_type = other RNA
aaataaataaaat

SEQ ID NO: 2601 - RNA, 13 nt, synthetic construct
  source 1..13: mol_type = other RNA
aaataaaataaat

SEQ ID NO: 2602 - RNA, 13 nt, synthetic construct
  source 1..13: mol_type = other RNA
aataaataaaata

SEQ ID NO: 2603 - RNA, 13 nt, synthetic construct
  source 1..13: mol_type = other RNA
ataaaataaataa

SEQ ID NO: 2604 - RNA, 13 nt, synthetic construct
  source 1..13: mol_type = other RNA
taaataaaataaa

SEQ ID NO: 2605 - RNA, 13 nt, synthetic construct
  source 1..13: mol_type = other RNA
aataaaataaata

SEQ ID NO: 2606 - RNA, 13 nt, synthetic construct
  source 1..13: mol_type = other RNA
ataaaaaaataaa

SEQ ID NO: 2607 - RNA, 13 nt, synthetic construct
  source 1..13: mol_type = other RNA
aaaaataatataa

SEQ ID NO: 2608 - RNA, 13 nt, synthetic construct
  source 1..13: mol_type = other RNA
aaaaatataataa

SEQ ID NO: 2609 - RNA, 13 nt, synthetic construct
  source 1..13: mol_type = other RNA
aaaataatataaa

SEQ ID NO: 2610 - RNA, 13 nt, synthetic construct
  source 1..13: mol_type = other RNA
aaaatataataaa

SEQ ID NO: 2611 - RNA, 13 nt, synthetic construct
  source 1..13: mol_type = other RNA
aaaatataaaata

SEQ ID NO: 2612 - RNA, 13 nt, synthetic construct
  source 1..13: mol_type = other RNA
taaaaaaaaatat

SEQ ID NO: 2613 - RNA, 13 nt, synthetic construct
  source 1..13: mol_type = other RNA
aaataatatatat

SEQ ID NO: 2614 - RNA, 13 nt, synthetic construct
  source 1..13: mol_type = other RNA
taaaaataaatat

SEQ ID NO: 2615 - RNA, 13 nt, synthetic construct
  source 1..13: mol_type = other RNA
taaataaaaatat

SEQ ID NO: 2616 - RNA, 13 nt, synthetic construct
  source 1..13: mol_type = other RNA
ataaaaaaaatat

SEQ ID NO: 2617 - RNA, 13 nt, synthetic construct
  source 1..13: mol_type = other RNA
aataaaaatataa

SEQ ID NO: 2618 - RNA, 13 nt, synthetic construct
  source 1..13: mol_type = other RNA
aatataaaaataa

SEQ ID NO: 2619 - RNA, 13 nt, synthetic construct
  source 1..13: mol_type = other RNA
taaatataatata

SEQ ID NO: 2620 - RNA, 13 nt, synthetic construct
  source 1..13: mol_type = other RNA
aatataaatatac

SEQ ID NO: 2621 - RNA, 13 nt, synthetic construct
  source 1..13: mol_type = other RNA
ataaaataaatat

SEQ ID NO: 2622 - RNA, 13 nt, synthetic construct
  source 1..13: mol_type = other RNA
ataaataaaatat

SEQ ID NO: 2623 - RNA, 13 nt, synthetic construct
  source 1..13: mol_type = other RNA
taatataaataaa

SEQ ID NO: 2624 - RNA, 13 nt, synthetic construct
  source 1..13: mol_type = other RNA
taataaatataaa

SEQ ID NO: 2625 - RNA, 13 nt, synthetic construct
  source 1..13: mol_type = other RNA
aaaaatataatat

SEQ ID NO: 2626 - RNA, 14 nt, synthetic construct
  source 1..14: mol_type = other RNA
aaataaataaataa

SEQ ID NO: 2627 - RNA, 14 nt, synthetic construct
  source 1..14: mol_type = other RNA
aaataaataaatat

SEQ ID NO: 2628 - RNA, 14 nt, synthetic construct
  source 1..14: mol_type = other RNA
aaaaaaaaaatata

SEQ ID NO: 2629 - RNA, 14 nt, synthetic construct
  source 1..14: mol_type = other RNA
aaaaaataaatata

SEQ ID NO: 2630 - RNA, 14 nt, synthetic construct
  source 1..14: mol_type = other RNA
aataaataaatata

SEQ ID NO: 2631 - RNA, 14 nt, synthetic construct
  source 1..14: mol_type = other RNA
aaaatataaatata

SEQ ID NO: 2632 - RNA, 14 nt, synthetic construct
  source 1..14: mol_type = other RNA
aaataaaaaatata

SEQ ID NO: 2633 - RNA, 14 nt, synthetic construct
  source 1..14: mol_type = other RNA
aaaaaaaatatata

SEQ ID NO: 2634 - RNA, 14 nt, synthetic construct
  source 1..14: mol_type = other RNA
aaaataaatatata

SEQ ID NO: 2635 - RNA, 14 nt, synthetic construct
  source 1..14: mol_type = other RNA
aaaaaaaaaaataa

SEQ ID NO: 2636 - RNA, 14 nt, synthetic construct
  source 1..14: mol_type = other RNA
aaaaaaataaataa

SEQ ID NO: 2637 - RNA, 14 nt, synthetic construct
  source 1..14: mol_type = other RNA
aaaaaaaaaataaa

SEQ ID NO: 2638 - RNA, 14 nt, synthetic construct
  source 1..14: mol_type = other RNA
aaaaaataaataaa

SEQ ID NO: 2639 - RNA, 14 nt, synthetic construct
  source 1..14: mol_type = other RNA
aaaaaaaaaaatat

SEQ ID NO: 2640 - RNA, 14 nt, synthetic construct
  source 1..14: mol_type = other RNA
aaaaaaataaatat

SEQ ID NO: 2641 - RNA, 14 nt, synthetic construct
  source 1..14: mol_type = other RNA
aaatataaatataa

SEQ ID NO: 2642 - RNA, 14 nt, synthetic construct
  source 1..14: mol_type = other RNA
aaataataaatata

SEQ ID NO: 2643 - RNA, 14 nt, synthetic construct
  source 1..14: mol_type = other RNA
aaataaataatata

SEQ ID NO: 2644 - RNA, 14 nt, synthetic construct
  source 1..14: mol_type = other RNA
aaataaatatataa

SEQ ID NO: 2645 - RNA, 14 nt, synthetic construct
  source 1..14: mol_type = other RNA
aaatatataaataa

SEQ ID NO: 2646 - RNA, 14 nt, synthetic construct
  source 1..14: mol_type = other RNA
aaaaaaaaaaaata

SEQ ID NO: 2647 - RNA, 14 nt, synthetic construct
  source 1..14: mol_type = other RNA
aaaaaaaataaata

SEQ ID NO: 2648 - RNA, 14 nt, synthetic construct
  source 1..14: mol_type = other RNA
aaaataaataaata

SEQ ID NO: 2649 - RNA, 14 nt, synthetic construct
  source 1..14: mol_type = other RNA
aaatataaaatata

SEQ ID NO: 2650 - RNA, 14 nt, synthetic construct
  source 1..14: mol_type = other RNA
aaatataaatatat

SEQ ID NO: 2651 - RNA, 14 nt, synthetic construct
  source 1..14: mol_type = other RNA
aaatatataaatat

SEQ ID NO: 2652 - RNA, 14 nt, synthetic construct
  source 1..14: mol_type = other RNA
aataaataaataaa

SEQ ID NO: 2653 - RNA, 14 nt, synthetic construct
  source 1..14: mol_type = other RNA
aaaaaaaaatataa

SEQ ID NO: 2654 - RNA, 14 nt, synthetic construct
  source 1..14: mol_type = other RNA
aaaaataaatataa

SEQ ID NO: 2655 - RNA, 14 nt, synthetic construct
  source 1..14: mol_type = other RNA
aaaaatataaataa

SEQ ID NO: 2656 - RNA, 14 nt, synthetic construct
  source 1..14: mol_type = other RNA
aaaaaaaatataaa

SEQ ID NO: 2657 - RNA, 14 nt, synthetic construct
  source 1..14: mol_type = other RNA
aaaataaatataaa

SEQ ID NO: 2658 - RNA, 14 nt, synthetic construct
  source 1..14: mol_type = other RNA
aaaatataaataaa

SEQ ID NO: 2659 - RNA, 14 nt, synthetic construct
  source 1..14: mol_type = other RNA
aaataaaatatata

SEQ ID NO: 2660 - RNA, 14 nt, synthetic construct
  source 1..14: mol_type = other RNA
aaataaatatatat

SEQ ID NO: 2661 - RNA, 14 nt, synthetic construct
  source 1..14: mol_type = other RNA
aaataaaaaaataa

SEQ ID NO: 2662 - RNA, 14 nt, synthetic construct
  source 1..14: mol_type = other RNA
aaaaaatatatata

SEQ ID NO: 2663 - RNA, 14 nt, synthetic construct
  source 1..14: mol_type = other RNA
taaatataaatata

SEQ ID NO: 2664 - RNA, 14 nt, synthetic construct
  source 1..14: mol_type = other RNA
aaataaaaaataaa

SEQ ID NO: 2665 - RNA, 14 nt, synthetic construct
  source 1..14: mol_type = other RNA
aaaaatataaatat

SEQ ID NO: 2666 - RNA, 14 nt, synthetic construct
  source 1..14: mol_type = other RNA
aaaaaaaaaataat

SEQ ID NO: 2667 - RNA, 14 nt, synthetic construct
  source 1..14: mol_type = other RNA
aaataaaaaaatat

SEQ ID NO: 2668 - RNA, 14 nt, synthetic construct
  source 1..14: mol_type = other RNA
aaaaaataaataat

SEQ ID NO: 2669 - RNA, 14 nt, synthetic construct
  source 1..14: mol_type = other RNA
taaataaatatata

SEQ ID NO: 2670 - RNA, 14 nt, synthetic construct
  source 1..14: mol_type = other RNA
aaaaataaaatata

SEQ ID NO: 2671 - RNA, 14 nt, synthetic construct
  source 1..14: mol_type = other RNA
aaaataaaaatata

SEQ ID NO: 2672 - RNA, 14 nt, synthetic construct
  source 1..14: mol_type = other RNA
aaaaaaaaatatat

SEQ ID NO: 2673 - RNA, 14 nt, synthetic construct
  source 1..14: mol_type = other RNA
aaaaaaaaaaaaaa

SEQ ID NO: 2674 - RNA, 14 nt, synthetic construct
  source 1..14: mol_type = other RNA
aaaaataaatatat

SEQ ID NO: 2675 - RNA, 14 nt, synthetic construct
  source 1..14: mol_type = other RNA
aaataaataaatac

SEQ ID NO: 2676 - RNA, 14 nt, synthetic construct
  source 1..14: mol_type = other RNA
aaaaaatataaata

SEQ ID NO: 2677 - RNA, 14 nt, synthetic construct
  source 1..14: mol_type = other RNA
aatatataaatata

SEQ ID NO: 2678 - RNA, 14 nt, synthetic construct
  source 1..14: mol_type = other RNA
aatataaatatata

SEQ ID NO: 2679 - RNA, 14 nt, synthetic construct
  source 1..14: mol_type = other RNA
aaataaaaaaaata

SEQ ID NO: 2680 - RNA, 14 nt, synthetic construct
  source 1..14: mol_type = other RNA
aaataataaataaa

SEQ ID NO: 2681 - RNA, 14 nt, synthetic construct
  source 1..14: mol_type = other RNA
aaataaaataaata

SEQ ID NO: 2682 - RNA, 14 nt, synthetic construct
  source 1..14: mol_type = other RNA
aaataaataataaa

SEQ ID NO: 2683 - RNA, 14 nt, synthetic construct
  source 1..14: mol_type = other RNA
aaataaataaaata

SEQ ID NO: 2684 - RNA, 14 nt, synthetic construct
  source 1..14: mol_type = other RNA
aataaatatatata

SEQ ID NO: 2685 - RNA, 14 nt, synthetic construct
  source 1..14: mol_type = other RNA
aaaaaaataatata

SEQ ID NO: 2686 - RNA, 14 nt, synthetic construct
  source 1..14: mol_type = other RNA
aaatataaaaataa

SEQ ID NO: 2687 - RNA, 14 nt, synthetic construct
  source 1..14: mol_type = other RNA
aaataaaaatataa

SEQ ID NO: 2688 - RNA, 14 nt, synthetic construct
  source 1..14: mol_type = other RNA
aaatataaatatac

SEQ ID NO: 2689 - RNA, 14 nt, synthetic construct
  source 1..14: mol_type = other RNA
aaataaaatataaa

SEQ ID NO: 2690 - RNA, 14 nt, synthetic construct
  source 1..14: mol_type = other RNA
aaatataaaataaa

SEQ ID NO: 2691 - RNA, 14 nt, synthetic construct
  source 1..14: mol_type = other RNA
aaaaaaatatataa

SEQ ID NO: 2692 - RNA, 14 nt, synthetic construct
  source 1..14: mol_type = other RNA
taaataaataaata

SEQ ID NO: 2693 - RNA, 14 nt, synthetic construct
  source 1..14: mol_type = other RNA
aataaataaataat

SEQ ID NO: 2694 - RNA, 14 nt, synthetic construct
  source 1..14: mol_type = other RNA
aaaaaatatataaa

SEQ ID NO: 2695 - RNA, 14 nt, synthetic construct
  source 1..14: mol_type = other RNA
aataaaaaaatata

SEQ ID NO: 2696 - RNA, 14 nt, synthetic construct
  source 1..14: mol_type = other RNA
atataaataaataa

SEQ ID NO: 2697 - RNA, 14 nt, synthetic construct
  source 1..14: mol_type = other RNA
aaaaaaaatataat

SEQ ID NO: 2698 - RNA, 14 nt, synthetic construct
  source 1..14: mol_type = other RNA
aaataaatatatac

SEQ ID NO: 2699 - RNA, 14 nt, synthetic construct
  source 1..14: mol_type = other RNA
aaatataaaaatat

SEQ ID NO: 2700 - RNA, 14 nt, synthetic construct
  source 1..14: mol_type = other RNA
aaaatataaataat

SEQ ID NO: 2701 - RNA, 14 nt, synthetic construct
  source 1..14: mol_type = other RNA
aaaataaatataat

SEQ ID NO: 2702 - RNA, 14 nt, synthetic construct
  source 1..14: mol_type = other RNA
aaaatatatatata

SEQ ID NO: 2703 - RNA, 14 nt, synthetic construct
  source 1..14: mol_type = other RNA
aaataaaaaataat

SEQ ID NO: 2704 - RNA, 14 nt, synthetic construct
  source 1..14: mol_type = other RNA
aataaatataaata

SEQ ID NO: 2705 - RNA, 14 nt, synthetic construct
  source 1..14: mol_type = other RNA
taaatataaataaa

SEQ ID NO: 2706 - RNA, 14 nt, synthetic construct
  source 1..14: mol_type = other RNA
tataaataaatata

SEQ ID NO: 2707 - RNA, 14 nt, synthetic construct
  source 1..14: mol_type = other RNA
taaataaatataaa

SEQ ID NO: 2708 - RNA, 14 nt, synthetic construct
  source 1..14: mol_type = other RNA
aatataaataaata

SEQ ID NO: 2709 - RNA, 14 nt, synthetic construct
  source 1..14: mol_type = other RNA
aaataaatataaat

SEQ ID NO: 2710 - RNA, 14 nt, synthetic construct
  source 1..14: mol_type = other RNA
ataaataaatataa

SEQ ID NO: 2711 - RNA, 14 nt, synthetic construct
  source 1..14: mol_type = other RNA
ataaatataaataa

SEQ ID NO: 2712 - RNA, 14 nt, synthetic construct
  source 1..14: mol_type = other RNA
aaatataaataaat

SEQ ID NO: 2713 - RNA, 14 nt, synthetic construct
  source 1..14: mol_type = other RNA
atataaataaatat

SEQ ID NO: 2714 - RNA, 14 nt, synthetic construct
  source 1..14: mol_type = other RNA
aaaaaaaaaatatt

SEQ ID NO: 2715 - RNA, 14 nt, synthetic construct
  source 1..14: mol_type = other RNA
aaaaaataaatatt

SEQ ID NO: 2716 - RNA, 14 nt, synthetic construct
  source 1..14: mol_type = other RNA
aaataaaaatatat

SEQ ID NO: 2717 - RNA, 14 nt, synthetic construct
  source 1..14: mol_type = other RNA
aaataaaaaaaaaa

SEQ ID NO: 2718 - RNA, 14 nt, synthetic construct
  source 1..14: mol_type = other RNA
aaataaataaaaaa

SEQ ID NO: 2719 - RNA, 14 nt, synthetic construct
  source 1..14: mol_type = other RNA
aaatataatatata

SEQ ID NO: 2720 - RNA, 14 nt, synthetic construct
  source 1..14: mol_type = other RNA
aaatatataatata

SEQ ID NO: 2721 - RNA, 14 nt, synthetic construct
  source 1..14: mol_type = other RNA
aaaaaaatatatat

SEQ ID NO: 2722 - RNA, 14 nt, synthetic construct
  source 1..14: mol_type = other RNA
aaaaaaaaatatac

SEQ ID NO: 2723 - RNA, 14 nt, synthetic construct
  source 1..14: mol_type = other RNA
aaaaaataaaataa

SEQ ID NO: 2724 - RNA, 14 nt, synthetic construct
  source 1..14: mol_type = other RNA
aaaaataaaaataa

SEQ ID NO: 2725 - RNA, 14 nt, synthetic construct
  source 1..14: mol_type = other RNA
aaaataaaaaataa

SEQ ID NO: 2726 - RNA, 14 nt, synthetic construct
  source 1..14: mol_type = other RNA
aaaaataaatatac

SEQ ID NO: 2727 - RNA, 14 nt, synthetic construct
  source 1..14: mol_type = other RNA
ataaatataaatat

SEQ ID NO: 2728 - RNA, 14 nt, synthetic construct
  source 1..14: mol_type = other RNA
aaatataaaaaata

SEQ ID NO: 2729 - RNA, 14 nt, synthetic construct
  source 1..14: mol_type = other RNA
aaaataaaaataaa

SEQ ID NO: 2730 - RNA, 14 nt, synthetic construct
  source 1..14: mol_type = other RNA
aaaaataaaataaa

SEQ ID NO: 2731 - RNA, 14 nt, synthetic construct
  source 1..14: mol_type = other RNA
aatataaatataaa

SEQ ID NO: 2732 - RNA, 14 nt, synthetic construct
  source 1..14: mol_type = other RNA
taaaaaaaaatata

SEQ ID NO: 2733 - RNA, 14 nt, synthetic construct
  source 1..14: mol_type = other RNA
aaataatatatata

SEQ ID NO: 2734 - RNA, 14 nt, synthetic construct
  source 1..14: mol_type = other RNA
taaaaataaatata

SEQ ID NO: 2735 - RNA, 14 nt, synthetic construct
  source 1..14: mol_type = other RNA
aaaatatataaata

SEQ ID NO: 2736 - RNA, 14 nt, synthetic construct
  source 1..14: mol_type = other RNA
taaataaaaatata

SEQ ID NO: 2737 - RNA, 14 nt, synthetic construct
  source 1..14: mol_type = other RNA
ataaaaaaaatata

SEQ ID NO: 2738 - RNA, 14 nt, synthetic construct
  source 1..14: mol_type = other RNA
aaaaaataaaatat

SEQ ID NO: 2739 - RNA, 14 nt, synthetic construct
  source 1..14: mol_type = other RNA
aaaaataaaaatat

SEQ ID NO: 2740 - RNA, 14 nt, synthetic construct
  source 1..14: mol_type = other RNA
aaaataaaaaatat

SEQ ID NO: 2741 - RNA, 14 nt, synthetic construct
  source 1..14: mol_type = other RNA
ataaaataaatata

SEQ ID NO: 2742 - RNA, 14 nt, synthetic construct
  source 1..14: mol_type = other RNA
ataaataaaatata

SEQ ID NO: 2743 - RNA, 14 nt, synthetic construct
  source 1..14: mol_type = other RNA
aaatatatatataa

SEQ ID NO: 2744 - RNA, 14 nt, synthetic construct
  source 1..14: mol_type = other RNA
ataaataaatatat

SEQ ID NO: 2745 - RNA, 14 nt, synthetic construct
  source 1..14: mol_type = other RNA
aaaaatataatata

SEQ ID NO: 2746 - RNA, 14 nt, synthetic construct
  source 1..14: mol_type = other RNA
aataaatatataaa

SEQ ID NO: 2747 - RNA, 14 nt, synthetic construct
  source 1..14: mol_type = other RNA
aatatataaataaa

SEQ ID NO: 2748 - RNA, 14 nt, synthetic construct
  source 1..14: mol_type = other RNA
aaaaaaaaaaaaat

SEQ ID NO: 2749 - RNA, 14 nt, synthetic construct
  source 1..14: mol_type = other RNA
aaaaaaaaataaat

SEQ ID NO: 2750 - RNA, 14 nt, synthetic construct
  source 1..14: mol_type = other RNA
aaaaaaaaaaatac

SEQ ID NO: 2751 - RNA, 14 nt, synthetic construct
  source 1..14: mol_type = other RNA
aaataataaataat

SEQ ID NO: 2752 - RNA, 14 nt, synthetic construct
  source 1..14: mol_type = other RNA
aaataaataataat

SEQ ID NO: 2753 - RNA, 14 nt, synthetic construct
  source 1..14: mol_type = other RNA
aaaaaaataaatac

SEQ ID NO: 2754 - RNA, 14 nt, synthetic construct
  source 1..14: mol_type = other RNA
aaaaataaataaat

SEQ ID NO: 2755 - RNA, 14 nt, synthetic construct
  source 1..14: mol_type = other RNA
aatataaaaatata

SEQ ID NO: 2756 - RNA, 14 nt, synthetic construct
  source 1..14: mol_type = other RNA
aaaaataatatata

SEQ ID NO: 2757 - RNA, 14 nt, synthetic construct
  source 1..14: mol_type = other RNA
aaaaaaaataataa

SEQ ID NO: 2758 - RNA, 14 nt, synthetic construct
  source 1..14: mol_type = other RNA
aaaataaataataa

SEQ ID NO: 2759 - RNA, 14 nt, synthetic construct
  source 1..14: mol_type = other RNA
aaaataataaataa

SEQ ID NO: 2760 - RNA, 14 nt, synthetic construct
  source 1..14: mol_type = other RNA
aataaataaatatt

SEQ ID NO: 2761 - RNA, 14 nt, synthetic construct
  source 1..14: mol_type = other RNA
aaaaatatatataa

SEQ ID NO: 2762 - RNA, 14 nt, synthetic construct
  source 1..14: mol_type = other RNA
aaaaaaataataaa

SEQ ID NO: 2763 - RNA, 14 nt, synthetic construct
  source 1..14: mol_type = other RNA
aaaaaataaaaata

SEQ ID NO: 2764 - RNA, 14 nt, synthetic construct
  source 1..14: mol_type = other RNA
aaaataaaaaaata

SEQ ID NO: 2765 - RNA, 14 nt, synthetic construct
  source 1..14: mol_type = other RNA
aaaaataaaaaata

SEQ ID NO: 2766 - RNA, 14 nt, synthetic construct
  source 1..14: mol_type = other RNA
aaaaaaataaaata

SEQ ID NO: 2767 - RNA, 14 nt, synthetic construct
  source 1..14: mol_type = other RNA
aaataatataaata

SEQ ID NO: 2768 - RNA, 14 nt, synthetic construct
  source 1..14: mol_type = other RNA
aaatataaataata

SEQ ID NO: 2769 - RNA, 14 nt, synthetic construct
  source 1..14: mol_type = other RNA
aaataaatataata

SEQ ID NO: 2770 - RNA, 14 nt, synthetic construct
  source 1..14: mol_type = other RNA
aaatataataaata

SEQ ID NO: 2771 - RNA, 14 nt, synthetic construct
  source 1..14: mol_type = other RNA
aaataaaatataat

SEQ ID NO: 2772 - RNA, 14 nt, synthetic construct
  source 1..14: mol_type = other RNA
aaatataaaataat

SEQ ID NO: 2773 - RNA, 14 nt, synthetic construct
  source 1..14: mol_type = other RNA
aaaatatatataaa

SEQ ID NO: 2774 - RNA, 14 nt, synthetic construct
  source 1..14: mol_type = other RNA
aataaaaatatata

SEQ ID NO: 2775 - RNA, 14 nt, synthetic construct
  source 1..14: mol_type = other RNA
aaatatatatatat

SEQ ID NO: 2776 - RNA, 14 nt, synthetic construct
  source 1..14: mol_type = other RNA
aataaaaaaaataa

SEQ ID NO: 2777 - RNA, 14 nt, synthetic construct
  source 1..14: mol_type = other RNA
taataaataaataa

SEQ ID NO: 2778 - RNA, 14 nt, synthetic construct
  source 1..14: mol_type = other RNA
aaaatataaatatt

SEQ ID NO: 2779 - RNA, 14 nt, synthetic construct
  source 1..14: mol_type = other RNA
aaaaaatatataat

SEQ ID NO: 2780 - RNA, 14 nt, synthetic construct
  source 1..14: mol_type = other RNA
aataaataaaataa

SEQ ID NO: 2781 - RNA, 14 nt, synthetic construct
  source 1..14: mol_type = other RNA
aataaaataaataa

SEQ ID NO: 2782 - RNA, 14 nt, synthetic construct
  source 1..14: mol_type = other RNA
aaatataaaaaaaa

SEQ ID NO: 2783 - RNA, 14 nt, synthetic construct
  source 1..14: mol_type = other RNA
aaaaaaaataatat

SEQ ID NO: 2784 - RNA, 14 nt, synthetic construct
  source 1..14: mol_type = other RNA
aataaaaaaataaa

SEQ ID NO: 2785 - RNA, 14 nt, synthetic construct
  source 1..14: mol_type = other RNA
aaatataaatatag

SEQ ID NO: 2786 - RNA, 14 nt, synthetic construct
  source 1..14: mol_type = other RNA
aaataaatataaaa

SEQ ID NO: 2787 - RNA, 14 nt, synthetic construct
  source 1..14: mol_type = other RNA
aaatataaataaaa

SEQ ID NO: 2788 - RNA, 14 nt, synthetic construct
  source 1..14: mol_type = other RNA
aaaataaataatat

SEQ ID NO: 2789 - RNA, 14 nt, synthetic construct
  source 1..14: mol_type = other RNA
aaaataataaatat

SEQ ID NO: 2790 - RNA, 14 nt, synthetic construct
  source 1..14: mol_type = other RNA
aaataaaaaatatt

SEQ ID NO: 2791 - RNA, 14 nt, synthetic construct
  source 1..14: mol_type = other RNA
atataaaaaatata

SEQ ID NO: 2792 - RNA, 14 nt, synthetic construct
  source 1..14: mol_type = other RNA
aaaatataaaataa

SEQ ID NO: 2793 - RNA, 14 nt, synthetic construct
  source 1..14: mol_type = other RNA
aaaataaaatataa

SEQ ID NO: 2794 - RNA, 14 nt, synthetic construct
  source 1..14: mol_type = other RNA
aaatatataaatac

SEQ ID NO: 2795 - RNA, 14 nt, synthetic construct
  source 1..14: mol_type = other RNA
aaaaaaaatatatt

SEQ ID NO: 2796 - RNA, 14 nt, synthetic construct
  source 1..14: mol_type = other RNA
aaatataatataaa

SEQ ID NO: 2797 - RNA, 14 nt, synthetic construct
  source 1..14: mol_type = other RNA
aaaataaatatatt

SEQ ID NO: 2798 - RNA, 14 nt, synthetic construct
  source 1..14: mol_type = other RNA
taataaataaatat

SEQ ID NO: 2799 - RNA, 14 nt, synthetic construct
  source 1..14: mol_type = other RNA
aataaaaaaaatat

SEQ ID NO: 2800 - RNA, 14 nt, synthetic construct
  source 1..14: mol_type = other RNA
aataaaataaatat

SEQ ID NO: 2801 - RNA, 14 nt, synthetic construct
  source 1..14: mol_type = other RNA
aataaataaaatat

SEQ ID NO: 2802 - RNA, 14 nt, synthetic construct
  source 1..14: mol_type = other RNA
taaatataaataat

SEQ ID NO: 2803 - RNA, 14 nt, synthetic construct
  source 1..14: mol_type = other RNA
taaataaatataat

SEQ ID NO: 2804 - RNA, 14 nt, synthetic construct
  source 1..14: mol_type = other RNA
aaataaaaatatac

SEQ ID NO: 2805 - RNA, 14 nt, synthetic construct
  source 1..14: mol_type = other RNA
taaatatatatata

SEQ ID NO: 2806 - RNA, 14 nt, synthetic construct
  source 1..14: mol_type = other RNA
aaataaatatatag

SEQ ID NO: 2807 - RNA, 14 nt, synthetic construct
  source 1..14: mol_type = other RNA
tataaataaataaa

SEQ ID NO: 2808 - RNA, 14 nt, synthetic construct
  source 1..14: mol_type = other RNA
aaaaatatatatat

SEQ ID NO: 2809 - RNA, 14 nt, synthetic construct
  source 1..14: mol_type = other RNA
aaaaaaatatatac

SEQ ID NO: 2810 - RNA, 14 nt, synthetic construct
  source 1..14: mol_type = other RNA
aaaatataaaatat

SEQ ID NO: 2811 - RNA, 14 nt, synthetic construct
  source 1..14: mol_type = other RNA
aaataatatataaa

SEQ ID NO: 2812 - RNA, 14 nt, synthetic construct
  source 1..14: mol_type = other RNA
aaatatataataaa

SEQ ID NO: 2813 - RNA, 14 nt, synthetic construct
  source 1..14: mol_type = other RNA
aaatatataaaata

SEQ ID NO: 2814 - RNA, 14 nt, synthetic construct
  source 1..14: mol_type = other RNA
aaaaaaaaaataag

SEQ ID NO: 2815 - RNA, 14 nt, synthetic construct
  source 1..14: mol_type = other RNA
aaaaaaaaataata

SEQ ID NO: 2816 - RNA, 14 nt, synthetic construct
  source 1..14: mol_type = other RNA
aaaaaataaataag

SEQ ID NO: 2817 - RNA, 14 nt, synthetic construct
  source 1..14: mol_type = other RNA
aaaaataataaata

SEQ ID NO: 2818 - RNA, 14 nt, synthetic construct
  source 1..14: mol_type = other RNA
aaaaataaataata

SEQ ID NO: 2819 - RNA, 14 nt, synthetic construct
  source 1..14: mol_type = other RNA
aaaaaaatataaat

SEQ ID NO: 2820 - RNA, 14 nt, synthetic construct
  source 1..14: mol_type = other RNA
taaaaaaatatata

SEQ ID NO: 2821 - RNA, 14 nt, synthetic construct
  source 1..14: mol_type = other RNA
aaaataaaaataat

SEQ ID NO: 2822 - RNA, 14 nt, synthetic construct
  source 1..14: mol_type = other RNA
aaaaataaaataat

SEQ ID NO: 2823 - RNA, 14 nt, synthetic construct
  source 1..14: mol_type = other RNA
aaaaatataaatac

SEQ ID NO: 2824 - RNA, 14 nt, synthetic construct
  source 1..14: mol_type = other RNA
caaaaaaaaatata

SEQ ID NO: 2825 - RNA, 14 nt, synthetic construct
  source 1..14: mol_type = other RNA
aatataaatataat

SEQ ID NO: 2826 - RNA, 14 nt, synthetic construct
  source 1..14: mol_type = other RNA
aaaaaacaaaaaac

SEQ ID NO: 2827 - RNA, 15 nt, synthetic construct
  source 1..15: mol_type = other RNA
aaataaataaatata

SEQ ID NO: 2828 - RNA, 15 nt, synthetic construct
  source 1..15: mol_type = other RNA
aaataaataaataaa

SEQ ID NO: 2829 - RNA, 15 nt, synthetic construct
  source 1..15: mol_type = other RNA
aaaaaaaaaaatata

SEQ ID NO: 2830 - RNA, 15 nt, synthetic construct
  source 1..15: mol_type = other RNA
aaaaaaataaatata

SEQ ID NO: 2831 - RNA, 15 nt, synthetic construct
  source 1..15: mol_type = other RNA
aaatataaatatata

SEQ ID NO: 2832 - RNA, 15 nt, synthetic construct
  source 1..15: mol_type = other RNA
aaatatataaatata

SEQ ID NO: 2833 - RNA, 15 nt, synthetic construct
  source 1..15: mol_type = other RNA
aaataaatatatata

SEQ ID NO: 2834 - RNA, 15 nt, synthetic construct
  source 1..15: mol_type = other RNA
aaaaatataaatata

SEQ ID NO: 2835 - RNA, 15 nt, synthetic construct
  source 1..15: mol_type = other RNA
aaataaataaataat

SEQ ID NO: 2836 - RNA, 15 nt, synthetic construct
  source 1..15: mol_type = other RNA
aaataaaaaaatata

SEQ ID NO: 2837 - RNA, 15 nt, synthetic construct
  source 1..15: mol_type = other RNA
aaaaaaaaatatata

SEQ ID NO: 2838 - RNA, 15 nt, synthetic construct
  source 1..15: mol_type = other RNA
aaaaataaatatata

SEQ ID NO: 2839 - RNA, 15 nt, synthetic construct
  source 1..15: mol_type = other RNA
aaaaaaaaaaaataa

SEQ ID NO: 2840 - RNA, 15 nt, synthetic construct
  source 1..15: mol_type = other RNA
aaaaaaaataaataa

SEQ ID NO: 2841 - RNA, 15 nt, synthetic construct
  source 1..15: mol_type = other RNA
aaaataaataaataa

SEQ ID NO: 2842 - RNA, 15 nt, synthetic construct
  source 1..15: mol_type = other RNA
aaaaaaaaaaataaa

SEQ ID NO: 2843 - RNA, 15 nt, synthetic construct
  source 1..15: mol_type = other RNA
aaaaaaataaataaa

SEQ ID NO: 2844 - RNA, 15 nt, synthetic construct
  source 1..15: mol_type = other RNA
aaataaatataaata

SEQ ID NO: 2845 - RNA, 15 nt, synthetic construct
  source 1..15: mol_type = other RNA
aaatataaataaata

SEQ ID NO: 2846 - RNA, 15 nt, synthetic construct
  source 1..15: mol_type = other RNA
aaaaaaaaaaaatat

SEQ ID NO: 2847 - RNA, 15 nt, synthetic construct
  source 1..15: mol_type = other RNA
aaaaaaaataaatat

SEQ ID NO: 2848 - RNA, 15 nt, synthetic construct
  source 1..15: mol_type = other RNA
aaaataaataaatat

SEQ ID NO: 2849 - RNA, 15 nt, synthetic construct
  source 1..15: mol_type = other RNA
aaatataaatataaa

SEQ ID NO: 2850 - RNA, 15 nt, synthetic construct
  source 1..15: mol_type = other RNA
aaataaatatataaa

SEQ ID NO: 2851 - RNA, 15 nt, synthetic construct
  source 1..15: mol_type = other RNA
aaatatataaataaa

SEQ ID NO: 2852 - RNA, 15 nt, synthetic construct
  source 1..15: mol_type = other RNA
aaaaaaaaaaaaata

SEQ ID NO: 2853 - RNA, 15 nt, synthetic construct
  source 1..15: mol_type = other RNA
aaaaaaaaataaata

SEQ ID NO: 2854 - RNA, 15 nt, synthetic construct
  source 1..15: mol_type = other RNA
aaaaataaataaata

SEQ ID NO: 2855 - RNA, 15 nt, synthetic construct
  source 1..15: mol_type = other RNA
aaatataaaaatata

SEQ ID NO: 2856 - RNA, 15 nt, synthetic construct
  source 1..15: mol_type = other RNA
aaaaaaaaaatataa

SEQ ID NO: 2857 - RNA, 15 nt, synthetic construct
  source 1..15: mol_type = other RNA
aaataaataaatatt

SEQ ID NO: 2858 - RNA, 15 nt, synthetic construct
  source 1..15: mol_type = other RNA
aaaaaataaatataa

SEQ ID NO: 2859 - RNA, 15 nt, synthetic construct
  source 1..15: mol_type = other RNA
aaaaaatataaataa

SEQ ID NO: 2860 - RNA, 15 nt, synthetic construct
  source 1..15: mol_type = other RNA
atataaataaatata

SEQ ID NO: 2861 - RNA, 15 nt, synthetic construct
  source 1..15: mol_type = other RNA
aaaaaaaaatataaa

SEQ ID NO: 2862 - RNA, 15 nt, synthetic construct
  source 1..15: mol_type = other RNA
aaaaataaatataaa

SEQ ID NO: 2863 - RNA, 15 nt, synthetic construct
  source 1..15: mol_type = other RNA
aaaaatataaataaa

SEQ ID NO: 2864 - RNA, 15 nt, synthetic construct
  source 1..15: mol_type = other RNA
aaataaaaatatata

SEQ ID NO: 2865 - RNA, 15 nt, synthetic construct
  source 1..15: mol_type = other RNA
aaataaaaaaaataa

SEQ ID NO: 2866 - RNA, 15 nt, synthetic construct
  source 1..15: mol_type = other RNA
aaataaataaaataa

SEQ ID NO: 2867 - RNA, 15 nt, synthetic construct
  source 1..15: mol_type = other RNA
aaataaaataaataa

SEQ ID NO: 2868 - RNA, 15 nt, synthetic construct
  source 1..15: mol_type = other RNA
aaaaaaatatatata

SEQ ID NO: 2869 - RNA, 15 nt, synthetic construct
  source 1..15: mol_type = other RNA
aaataaaaaaataaa

SEQ ID NO: 2870 - RNA, 15 nt, synthetic construct
  source 1..15: mol_type = other RNA
aaaaaatataaatat

SEQ ID NO: 2871 - RNA, 15 nt, synthetic construct
  source 1..15: mol_type = other RNA
ataaatataaatata

SEQ ID NO: 2872 - RNA, 15 nt, synthetic construct
  source 1..15: mol_type = other RNA
aaaaaaaaaaataat

SEQ ID NO: 2873 - RNA, 15 nt, synthetic construct
  source 1..15: mol_type = other RNA
aaataaaaaaaatat

SEQ ID NO: 2874 - RNA, 15 nt, synthetic construct
  source 1..15: mol_type = other RNA
aaaaaaataaataat

SEQ ID NO: 2875 - RNA, 15 nt, synthetic construct
  source 1..15: mol_type = other RNA
aaataaataaaatat

SEQ ID NO: 2876 - RNA, 15 nt, synthetic construct
  source 1..15: mol_type = other RNA
aaataaaataaatat

SEQ ID NO: 2877 - RNA, 15 nt, synthetic construct
  source 1..15: mol_type = other RNA
aaaaaataaaatata

SEQ ID NO: 2878 - RNA, 15 nt, synthetic construct
  source 1..15: mol_type = other RNA
aaaataaaaaatata

SEQ ID NO: 2879 - RNA, 15 nt, synthetic construct
  source 1..15: mol_type = other RNA
aaaaataaaaatata

SEQ ID NO: 2880 - RNA, 15 nt, synthetic construct
  source 1..15: mol_type = other RNA
aaaaaaaaaatatat

SEQ ID NO: 2881 - RNA, 15 nt, synthetic construct
  source 1..15: mol_type = other RNA
aaaaaaaaaaaaaaa

SEQ ID NO: 2882 - RNA, 15 nt, synthetic construct
  source 1..15: mol_type = other RNA
aaaaaataaatatat

SEQ ID NO: 2883 - RNA, 15 nt, synthetic construct
  source 1..15: mol_type = other RNA
taaataaataaataa

SEQ ID NO: 2884 - RNA, 15 nt, synthetic construct
  source 1..15: mol_type = other RNA
ataaataaatatata

SEQ ID NO: 2885 - RNA, 15 nt, synthetic construct
  source 1..15: mol_type = other RNA
aaaaaaatataaata

SEQ ID NO: 2886 - RNA, 15 nt, synthetic construct
  source 1..15: mol_type = other RNA
aaatataaatataat

SEQ ID NO: 2887 - RNA, 15 nt, synthetic construct
  source 1..15: mol_type = other RNA
taaataaataaatat

SEQ ID NO: 2888 - RNA, 15 nt, synthetic construct
  source 1..15: mol_type = other RNA
aaataaaaaaaaata

SEQ ID NO: 2889 - RNA, 15 nt, synthetic construct
  source 1..15: mol_type = other RNA
aatataaataaataa

SEQ ID NO: 2890 - RNA, 15 nt, synthetic construct
  source 1..15: mol_type = other RNA
aataaatataaataa

SEQ ID NO: 2891 - RNA, 15 nt, synthetic construct
  source 1..15: mol_type = other RNA
aataaataaatataa

SEQ ID NO: 2892 - RNA, 15 nt, synthetic construct
  source 1..15: mol_type = other RNA
aaataaataaaaata

SEQ ID NO: 2893 - RNA, 15 nt, synthetic construct
  source 1..15: mol_type = other RNA
aaataaaaataaata

SEQ ID NO: 2894 - RNA, 15 nt, synthetic construct
  source 1..15: mol_type = other RNA
aaaatataaatataa

SEQ ID NO: 2895 - RNA, 15 nt, synthetic construct
  source 1..15: mol_type = other RNA
aaataaatatataat

SEQ ID NO: 2896 - RNA, 15 nt, synthetic construct
  source 1..15: mol_type = other RNA
aaatatataaataat

SEQ ID NO: 2897 - RNA, 15 nt, synthetic construct
  source 1..15: mol_type = other RNA
aaatatatatatata

SEQ ID NO: 2898 - RNA, 15 nt, synthetic construct
  source 1..15: mol_type = other RNA
aaaaaaaataatata

SEQ ID NO: 2899 - RNA, 15 nt, synthetic construct
  source 1..15: mol_type = other RNA
aatataaataaatat

SEQ ID NO: 2900 - RNA, 15 nt, synthetic construct
  source 1..15: mol_type = other RNA
aataaatataaatat

SEQ ID NO: 2901 - RNA, 15 nt, synthetic construct
  source 1..15: mol_type = other RNA
aaataaaaaatataa

SEQ ID NO: 2902 - RNA, 15 nt, synthetic construct
  source 1..15: mol_type = other RNA
aaatataaaaaataa

SEQ ID NO: 2903 - RNA, 15 nt, synthetic construct
  source 1..15: mol_type = other RNA
aaaataaataatata

SEQ ID NO: 2904 - RNA, 15 nt, synthetic construct
  source 1..15: mol_type = other RNA
aaaataataaatata

SEQ ID NO: 2905 - RNA, 15 nt, synthetic construct
  source 1..15: mol_type = other RNA
aaatataaaaataaa

SEQ ID NO: 2906 - RNA, 15 nt, synthetic construct
  source 1..15: mol_type = other RNA
aaataaaaatataaa

SEQ ID NO: 2907 - RNA, 15 nt, synthetic construct
  source 1..15: mol_type = other RNA
aaaaaaaatatataa

SEQ ID NO: 2908 - RNA, 15 nt, synthetic construct
  source 1..15: mol_type = other RNA
aaaataaatatataa

SEQ ID NO: 2909 - RNA, 15 nt, synthetic construct
  source 1..15: mol_type = other RNA
aaaatatataaataa

SEQ ID NO: 2910 - RNA, 15 nt, synthetic construct
  source 1..15: mol_type = other RNA
taataaataaatata

SEQ ID NO: 2911 - RNA, 15 nt, synthetic construct
  source 1..15: mol_type = other RNA
aaaaaaatatataaa

SEQ ID NO: 2912 - RNA, 15 nt, synthetic construct
  source 1..15: mol_type = other RNA
aataaaaaaaatata

SEQ ID NO: 2913 - RNA, 15 nt, synthetic construct
  source 1..15: mol_type = other RNA
ataaataaataaata

SEQ ID NO: 2914 - RNA, 15 nt, synthetic construct
  source 1..15: mol_type = other RNA
aataaataaaatata

SEQ ID NO: 2915 - RNA, 15 nt, synthetic construct
  source 1..15: mol_type = other RNA
aataaaataaatata

SEQ ID NO: 2916 - RNA, 15 nt, synthetic construct
  source 1..15: mol_type = other RNA
aataaataaatatat

SEQ ID NO: 2917 - RNA, 15 nt, synthetic construct
  source 1..15: mol_type = other RNA
aaaaaaaaatataat

SEQ ID NO: 2918 - RNA, 15 nt, synthetic construct
  source 1..15: mol_type = other RNA
atataaataaataaa

SEQ ID NO: 2919 - RNA, 15 nt, synthetic construct
  source 1..15: mol_type = other RNA
aaatataaaaaatat

SEQ ID NO: 2920 - RNA, 15 nt, synthetic construct
  source 1..15: mol_type = other RNA
aaaaatataaataat

SEQ ID NO: 2921 - RNA, 15 nt, synthetic construct
  source 1..15: mol_type = other RNA
aaaaataaatataat

SEQ ID NO: 2922 - RNA, 15 nt, synthetic construct
  source 1..15: mol_type = other RNA
aaaaatatatatata

SEQ ID NO: 2923 - RNA, 15 nt, synthetic construct
  source 1..15: mol_type = other RNA
aaaatataaaatata

SEQ ID NO: 2924 - RNA, 15 nt, synthetic construct
  source 1..15: mol_type = other RNA
aaaatataaatatat

SEQ ID NO: 2925 - RNA, 15 nt, synthetic construct
  source 1..15: mol_type = other RNA
aaaatatataaatat

SEQ ID NO: 2926 - RNA, 15 nt, synthetic construct
  source 1..15: mol_type = other RNA
aaataaataaataag

SEQ ID NO: 2927 - RNA, 15 nt, synthetic construct
  source 1..15: mol_type = other RNA
aaataaaaaaataat

SEQ ID NO: 2928 - RNA, 15 nt, synthetic construct
  source 1..15: mol_type = other RNA
aaatatatataaata

SEQ ID NO: 2929 - RNA, 15 nt, synthetic construct
  source 1..15: mol_type = other RNA
aaaaaaaaaaatatt

SEQ ID NO: 2930 - RNA, 15 nt, synthetic construct
  source 1..15: mol_type = other RNA
aaaaaaataaatatt

SEQ ID NO: 2931 - RNA, 15 nt, synthetic construct
  source 1..15: mol_type = other RNA
aaataaaaaatatat

SEQ ID NO: 2932 - RNA, 15 nt, synthetic construct
  source 1..15: mol_type = other RNA
ataaatataaataaa

SEQ ID NO: 2933 - RNA, 15 nt, synthetic construct
  source 1..15: mol_type = other RNA
ataaataaatataaa

SEQ ID NO: 2934 - RNA, 15 nt, synthetic construct
  source 1..15: mol_type = other RNA
aaataaaaaaaaaaa

SEQ ID NO: 2935 - RNA, 15 nt, synthetic construct
  source 1..15: mol_type = other RNA
aaataaataaaaaaa

SEQ ID NO: 2936 - RNA, 15 nt, synthetic construct
  source 1..15: mol_type = other RNA
aaaataaaatatata

SEQ ID NO: 2937 - RNA, 15 nt, synthetic construct
  source 1..15: mol_type = other RNA
aaaaaaaatatatat

SEQ ID NO: 2938 - RNA, 15 nt, synthetic construct
  source 1..15: mol_type = other RNA
aaaaaaaaaatatac

SEQ ID NO: 2939 - RNA, 15 nt, synthetic construct
  source 1..15: mol_type = other RNA
aaaataaatatatat

SEQ ID NO: 2940 - RNA, 15 nt, synthetic construct
  source 1..15: mol_type = other RNA
aaaaaaataaaataa

SEQ ID NO: 2941 - RNA, 15 nt, synthetic construct
  source 1..15: mol_type = other RNA
aaaaataaaaaataa

SEQ ID NO: 2942 - RNA, 15 nt, synthetic construct
  source 1..15: mol_type = other RNA
aaaaaataaaaataa

SEQ ID NO: 2943 - RNA, 15 nt, synthetic construct
  source 1..15: mol_type = other RNA
aaaataaaaaaataa

SEQ ID NO: 2944 - RNA, 15 nt, synthetic construct
  source 1..15: mol_type = other RNA
aaaaaataaatatac

SEQ ID NO: 2945 - RNA, 15 nt, synthetic construct
  source 1..15: mol_type = other RNA
aaataaataatataa

SEQ ID NO: 2946 - RNA, 15 nt, synthetic construct
  source 1..15: mol_type = other RNA
aaataataaatataa

SEQ ID NO: 2947 - RNA, 15 nt, synthetic construct
  source 1..15: mol_type = other RNA
aaataaatataataa

SEQ ID NO: 2948 - RNA, 15 nt, synthetic construct
  source 1..15: mol_type = other RNA
aaataatataaataa

SEQ ID NO: 2949 - RNA, 15 nt, synthetic construct
  source 1..15: mol_type = other RNA
aaatataaataataa

SEQ ID NO: 2950 - RNA, 15 nt, synthetic construct
  source 1..15: mol_type = other RNA
aaatataataaataa

SEQ ID NO: 2951 - RNA, 15 nt, synthetic construct
  source 1..15: mol_type = other RNA
aaatataaaaaaata

SEQ ID NO: 2952 - RNA, 15 nt, synthetic construct
  source 1..15: mol_type = other RNA
aaaataaaaaataaa

SEQ ID NO: 2953 - RNA, 15 nt, synthetic construct
  source 1..15: mol_type = other RNA
aaaaaataaaataaa

SEQ ID NO: 2954 - RNA, 15 nt, synthetic construct
  source 1..15: mol_type = other RNA
aaaaataaaaataaa

SEQ ID NO: 2955 - RNA, 15 nt, synthetic construct
  source 1..15: mol_type = other RNA
taaaaaaaaaatata

SEQ ID NO: 2956 - RNA, 15 nt, synthetic construct
  source 1..15: mol_type = other RNA
taaaaaataaatata

SEQ ID NO: 2957 - RNA, 15 nt, synthetic construct
  source 1..15: mol_type = other RNA
aaaaatatataaata

SEQ ID NO: 2958 - RNA, 15 nt, synthetic construct
  source 1..15: mol_type = other RNA
taaataaaaaatata

SEQ ID NO: 2959 - RNA, 15 nt, synthetic construct
  source 1..15: mol_type = other RNA
ataaaaaaaaatata

SEQ ID NO: 2960 - RNA, 15 nt, synthetic construct
  source 1..15: mol_type = other RNA
aaaataaaaaaatat

SEQ ID NO: 2961 - RNA, 15 nt, synthetic construct
  source 1..15: mol_type = other RNA
aaaaaaataaaatat

SEQ ID NO: 2962 - RNA, 15 nt, synthetic construct
  source 1..15: mol_type = other RNA
aaaaataaaaaatat

SEQ ID NO: 2963 - RNA, 15 nt, synthetic construct
  source 1..15: mol_type = other RNA
aaaaaataaaaatat

SEQ ID NO: 2964 - RNA, 15 nt, synthetic construct
  source 1..15: mol_type = other RNA
ataaaaataaatata

SEQ ID NO: 2965 - RNA, 15 nt, synthetic construct
  source 1..15: mol_type = other RNA
ataaataaaaatata

SEQ ID NO: 2966 - RNA, 15 nt, synthetic construct
  source 1..15: mol_type = other RNA
aaataatataaatat

SEQ ID NO: 2967 - RNA, 15 nt, synthetic construct
  source 1..15: mol_type = other RNA
aaataaatataatat

SEQ ID NO: 2968 - RNA, 15 nt, synthetic construct
  source 1..15: mol_type = other RNA
aaatataataaatat

SEQ ID NO: 2969 - RNA, 15 nt, synthetic construct
  source 1..15: mol_type = other RNA
aaatataaataatat

SEQ ID NO: 2970 - RNA, 15 nt, synthetic construct
  source 1..15: mol_type = other RNA
aaaaaatataatata

SEQ ID NO: 2971 - RNA, 15 nt, synthetic construct
  source 1..15: mol_type = other RNA
aaatataaaatataa

SEQ ID NO: 2972 - RNA, 15 nt, synthetic construct
  source 1..15: mol_type = other RNA
aaaaaaaaaaaaaat

SEQ ID NO: 2973 - RNA, 15 nt, synthetic construct
  source 1..15: mol_type = other RNA
aaatatatatataaa

SEQ ID NO: 2974 - RNA, 15 nt, synthetic construct
  source 1..15: mol_type = other RNA
aaaaaaaaaataaat

SEQ ID NO: 2975 - RNA, 15 nt, synthetic construct
  source 1..15: mol_type = other RNA
aaaaaaaaaaaatac

SEQ ID NO: 2976 - RNA, 15 nt, synthetic construct
  source 1..15: mol_type = other RNA
aaatatataaatatt

SEQ ID NO: 2977 - RNA, 15 nt, synthetic construct
  source 1..15: mol_type = other RNA
aaatataaatatatt

SEQ ID NO: 2978 - RNA, 15 nt, synthetic construct
  source 1..15: mol_type = other RNA
aaaaaataaataaat

SEQ ID NO: 2979 - RNA, 15 nt, synthetic construct
  source 1..15: mol_type = other RNA
aaaaaaaataaatac

SEQ ID NO: 2980 - RNA, 15 nt, synthetic construct
  source 1..15: mol_type = other RNA
aaaataaataaatac

SEQ ID NO: 2981 - RNA, 15 nt, synthetic construct
  source 1..15: mol_type = other RNA
aaataataaaatata

SEQ ID NO: 2982 - RNA, 15 nt, synthetic construct
  source 1..15: mol_type = other RNA
aaataaaataatata

SEQ ID NO: 2983 - RNA, 15 nt, synthetic construct
  source 1..15: mol_type = other RNA
aatataaaaaatata

SEQ ID NO: 2984 - RNA, 15 nt, synthetic construct
  source 1..15: mol_type = other RNA
aaataataaatatat

SEQ ID NO: 2985 - RNA, 15 nt, synthetic construct
  source 1..15: mol_type = other RNA
aaataaataatatat

SEQ ID NO: 2986 - RNA, 15 nt, synthetic construct
  source 1..15: mol_type = other RNA
aaaaaataatatata

SEQ ID NO: 2987 - RNA, 15 nt, synthetic construct
  source 1..15: mol_type = other RNA
aaataaaatatataa

SEQ ID NO: 2988 - RNA, 15 nt, synthetic construct
  source 1..15: mol_type = other RNA
aaatatataaaataa

SEQ ID NO: 2989 - RNA, 15 nt, synthetic construct
  source 1..15: mol_type = other RNA
aaaaaaaaataataa

SEQ ID NO: 2990 - RNA, 15 nt, synthetic construct
  source 1..15: mol_type = other RNA
aaaaataaataataa

SEQ ID NO: 2991 - RNA, 15 nt, synthetic construct
  source 1..15: mol_type = other RNA
aaaaataataaataa

SEQ ID NO: 2992 - RNA, 15 nt, synthetic construct
  source 1..15: mol_type = other RNA
aaataaatatatatt

SEQ ID NO: 2993 - RNA, 15 nt, synthetic construct
  source 1..15: mol_type = other RNA
aaaaaatatatataa

SEQ ID NO: 2994 - RNA, 15 nt, synthetic construct
  source 1..15: mol_type = other RNA
atatataaatatata

SEQ ID NO: 2995 - RNA, 15 nt, synthetic construct
  source 1..15: mol_type = other RNA
atataaatatatata

SEQ ID NO: 2996 - RNA, 15 nt, synthetic construct
  source 1..15: mol_type = other RNA
atatatataaatata

SEQ ID NO: 2997 - RNA, 15 nt, synthetic construct
  source 1..15: mol_type = other RNA
taaatataaatataa

SEQ ID NO: 2998 - RNA, 15 nt, synthetic construct
  source 1..15: mol_type = other RNA
aaaaaaaataataaa

SEQ ID NO: 2999 - RNA, 15 nt, synthetic construct
  source 1..15: mol_type = other RNA
aaaaaaataaaaata

SEQ ID NO: 3000 - RNA, 15 nt, synthetic construct
  source 1..15: mol_type = other RNA
aaaaaataaaaaata

SEQ ID NO: 3001 - RNA, 15 nt, synthetic construct
  source 1..15: mol_type = other RNA
aaaataaaaaaaata

SEQ ID NO: 3002 - RNA, 15 nt, synthetic construct
  source 1..15: mol_type = other RNA
aaaaataaaaaaata

SEQ ID NO: 3003 - RNA, 15 nt, synthetic construct
  source 1..15: mol_type = other RNA
aaaaaaaataaaata

SEQ ID NO: 3004 - RNA, 15 nt, synthetic construct
  source 1..15: mol_type = other RNA
aaaataaataataaa

SEQ ID NO: 3005 - RNA, 15 nt, synthetic construct
  source 1..15: mol_type = other RNA
aaaataataaataaa

SEQ ID NO: 3006 - RNA, 15 nt, synthetic construct
  source 1..15: mol_type = other RNA
aaaataaaataaata

SEQ ID NO: 3007 - RNA, 15 nt, synthetic construct
  source 1..15: mol_type = other RNA
aaaataaataaaata

SEQ ID NO: 3008 - RNA, 15 nt, synthetic construct
  source 1..15: mol_type = other RNA
aaataaaaatataat

SEQ ID NO: 3009 - RNA, 15 nt, synthetic construct
  source 1..15: mol_type = other RNA
aaatataaaaataat

SEQ ID NO: 3010 - RNA, 15 nt, synthetic construct
  source 1..15: mol_type = other RNA
aaaaatatatataaa

SEQ ID NO: 3011 - RNA, 15 nt, synthetic construct
  source 1..15: mol_type = other RNA
aataaaaaatatata

SEQ ID NO: 3012 - RNA, 15 nt, synthetic construct
  source 1..15: mol_type = other RNA
aataaaaaaaaataa

SEQ ID NO: 3013 - RNA, 15 nt, synthetic construct
  source 1..15: mol_type = other RNA
aaaaatataaatatt

SEQ ID NO: 3014 - RNA, 15 nt, synthetic construct
  source 1..15: mol_type = other RNA
aataaataaaaataa

SEQ ID NO: 3015 - RNA, 15 nt, synthetic construct
  source 1..15: mol_type = other RNA
aataaaaataaataa

SEQ ID NO: 3016 - RNA, 15 nt, synthetic construct
  source 1..15: mol_type = other RNA
taaataaataatata

SEQ ID NO: 3017 - RNA, 15 nt, synthetic construct
  source 1..15: mol_type = other RNA
taaataataaatata

SEQ ID NO: 3018 - RNA, 15 nt, synthetic construct
  source 1..15: mol_type = other RNA
aaaaaaatatataat

SEQ ID NO: 3019 - RNA, 15 nt, synthetic construct
  source 1..15: mol_type = other RNA
aataaataaatatac

SEQ ID NO: 3020 - RNA, 15 nt, synthetic construct
  source 1..15: mol_type = other RNA
aaatataaaatatat

SEQ ID NO: 3021 - RNA, 15 nt, synthetic construct
  source 1..15: mol_type = other RNA
aaatatataaaatat

SEQ ID NO: 3022 - RNA, 15 nt, synthetic construct
  source 1..15: mol_type = other RNA
aaatataaaaaaaaa

SEQ ID NO: 3023 - RNA, 15 nt, synthetic construct
  source 1..15: mol_type = other RNA
taataaataaataaa

SEQ ID NO: 3024 - RNA, 15 nt, synthetic construct
  source 1..15: mol_type = other RNA
aaaaaaaaataatat

SEQ ID NO: 3025 - RNA, 15 nt, synthetic construct
  source 1..15: mol_type = other RNA
aataaaaaaaataaa

SEQ ID NO: 3026 - RNA, 15 nt, synthetic construct
  source 1..15: mol_type = other RNA
aaataaatataaaaa

SEQ ID NO: 3027 - RNA, 15 nt, synthetic construct
  source 1..15: mol_type = other RNA
aaatataaataaaaa

SEQ ID NO: 3028 - RNA, 16 nt, synthetic construct
  source 1..16: mol_type = other RNA
aaaaaaaaaaaatata

SEQ ID NO: 3029 - RNA, 16 nt, synthetic construct
  source 1..16: mol_type = other RNA
aaaaaaaataaatata

SEQ ID NO: 3030 - RNA, 16 nt, synthetic construct
  source 1..16: mol_type = other RNA
aaaataaataaatata

SEQ ID NO: 3031 - RNA, 16 nt, synthetic construct
  source 1..16: mol_type = other RNA
aaataaataaatataa

SEQ ID NO: 3032 - RNA, 16 nt, synthetic construct
  source 1..16: mol_type = other RNA
aaatataaataaataa

SEQ ID NO: 3033 - RNA, 16 nt, synthetic construct
  source 1..16: mol_type = other RNA
aaataaatataaataa

SEQ ID NO: 3034 - RNA, 16 nt, synthetic construct
  source 1..16: mol_type = other RNA
aaataaatataaatat

SEQ ID NO: 3035 - RNA, 16 nt, synthetic construct
  source 1..16: mol_type = other RNA
aaatataaataaatat

SEQ ID NO: 3036 - RNA, 16 nt, synthetic construct
  source 1..16: mol_type = other RNA
aaaaaatataaatata

SEQ ID NO: 3037 - RNA, 16 nt, synthetic construct
  source 1..16: mol_type = other RNA
aaataaaaaaaatata

SEQ ID NO: 3038 - RNA, 16 nt, synthetic construct
  source 1..16: mol_type = other RNA
aaataaataaaatata

SEQ ID NO: 3039 - RNA, 16 nt, synthetic construct
  source 1..16: mol_type = other RNA
aaataaaataaatata

SEQ ID NO: 3040 - RNA, 16 nt, synthetic construct
  source 1..16: mol_type = other RNA
aaataaataaatatat

SEQ ID NO: 3041 - RNA, 16 nt, synthetic construct
  source 1..16: mol_type = other RNA
aaaaaaaaaatatata

SEQ ID NO: 3042 - RNA, 16 nt, synthetic construct
  source 1..16: mol_type = other RNA
aaaaaataaatatata

SEQ ID NO: 3043 - RNA, 16 nt, synthetic construct
  source 1..16: mol_type = other RNA
aaaaaaaaaaaaataa

SEQ ID NO: 3044 - RNA, 16 nt, synthetic construct
  source 1..16: mol_type = other RNA
aaaaaaaaataaataa

SEQ ID NO: 3045 - RNA, 16 nt, synthetic construct
  source 1..16: mol_type = other RNA
aaaaataaataaataa

SEQ ID NO: 3046 - RNA, 16 nt, synthetic construct
  source 1..16: mol_type = other RNA
aaaaaaaaaaaataaa

SEQ ID NO: 3047 - RNA, 16 nt, synthetic construct
  source 1..16: mol_type = other RNA
aaaaaaaataaataaa

SEQ ID NO: 3048 - RNA, 16 nt, synthetic construct
  source 1..16: mol_type = other RNA
aaaataaataaataaa

SEQ ID NO: 3049 - RNA, 16 nt, synthetic construct
  source 1..16: mol_type = other RNA
taaataaataaatata

SEQ ID NO: 3050 - RNA, 16 nt, synthetic construct
  source 1..16: mol_type = other RNA
aaaaaaaaaaaaatat

SEQ ID NO: 3051 - RNA, 16 nt, synthetic construct
  source 1..16: mol_type = other RNA
aaaaaaaaataaatat

SEQ ID NO: 3052 - RNA, 16 nt, synthetic construct
  source 1..16: mol_type = other RNA
aaaaataaataaatat

SEQ ID NO: 3053 - RNA, 16 nt, synthetic construct
  source 1..16: mol_type = other RNA
aataaatataaatata

SEQ ID NO: 3054 - RNA, 16 nt, synthetic construct
  source 1..16: mol_type = other RNA
aatataaataaatata

SEQ ID NO: 3055 - RNA, 16 nt, synthetic construct
  source 1..16: mol_type = other RNA
aaaaaaaaaaaaaata

SEQ ID NO: 3056 - RNA, 16 nt, synthetic construct
  source 1..16: mol_type = other RNA
aaaaaaaaaataaata

SEQ ID NO: 3057 - RNA, 16 nt, synthetic construct
  source 1..16: mol_type = other RNA
aaaaaataaataaata

SEQ ID NO: 3058 - RNA, 16 nt, synthetic construct
  source 1..16: mol_type = other RNA
aataaataaatatata

SEQ ID NO: 3059 - RNA, 16 nt, synthetic construct
  source 1..16: mol_type = other RNA
aaatataaaaaatata

SEQ ID NO: 3060 - RNA, 16 nt, synthetic construct
  source 1..16: mol_type = other RNA
aaaatataaatatata

SEQ ID NO: 3061 - RNA, 16 nt, synthetic construct
  source 1..16: mol_type = other RNA
aaaatatataaatata

SEQ ID NO: 3062 - RNA, 16 nt, synthetic construct
  source 1..16: mol_type = other RNA
aaaaaaaaaaatataa

SEQ ID NO: 3063 - RNA, 16 nt, synthetic construct
  source 1..16: mol_type = other RNA
aaaaaaataaatataa

SEQ ID NO: 3064 - RNA, 16 nt, synthetic construct
  source 1..16: mol_type = other RNA
aaaaaaatataaataa

SEQ ID NO: 3065 - RNA, 16 nt, synthetic construct
  source 1..16: mol_type = other RNA
aaaaaaaaaatataaa

SEQ ID NO: 3066 - RNA, 16 nt, synthetic construct
  source 1..16: mol_type = other RNA
aaaaaataaatataaa

SEQ ID NO: 3067 - RNA, 16 nt, synthetic construct
  source 1..16: mol_type = other RNA
aaaaaatataaataaa

SEQ ID NO: 3068 - RNA, 16 nt, synthetic construct
  source 1..16: mol_type = other RNA
aaataaaaaatatata

SEQ ID NO: 3069 - RNA, 16 nt, synthetic construct
  source 1..16: mol_type = other RNA
aaataaaaaaaaataa

SEQ ID NO: 3070 - RNA, 16 nt, synthetic construct
  source 1..16: mol_type = other RNA
aaataaataaaaataa

SEQ ID NO: 3071 - RNA, 16 nt, synthetic construct
  source 1..16: mol_type = other RNA
aaataaaaataaataa

SEQ ID NO: 3072 - RNA, 16 nt, synthetic construct
  source 1..16: mol_type = other RNA
aaataaataaatatac

SEQ ID NO: 3073 - RNA, 16 nt, synthetic construct
  source 1..16: mol_type = other RNA
aaaaaaaatatatata

SEQ ID NO: 3074 - RNA, 16 nt, synthetic construct
  source 1..16: mol_type = other RNA
aaaataaatatatata

SEQ ID NO: 3075 - RNA, 16 nt, synthetic construct
  source 1..16: mol_type = other RNA
aaataaaaaaaataaa

SEQ ID NO: 3076 - RNA, 16 nt, synthetic construct
  source 1..16: mol_type = other RNA
aaataaataaaataaa

SEQ ID NO: 3077 - RNA, 16 nt, synthetic construct
  source 1..16: mol_type = other RNA
aaataaaataaataaa

SEQ ID NO: 3078 - RNA, 16 nt, synthetic construct
  source 1..16: mol_type = other RNA
aaaaaaatataaatat

SEQ ID NO: 3079 - RNA, 16 nt, synthetic construct
  source 1..16: mol_type = other RNA
aaaaaaaaaaaataat

SEQ ID NO: 3080 - RNA, 16 nt, synthetic construct
  source 1..16: mol_type = other RNA
aaataaaaaaaaatat

SEQ ID NO: 3081 - RNA, 16 nt, synthetic construct
  source 1..16: mol_type = other RNA
aaaaaaaataaataat

SEQ ID NO: 3082 - RNA, 16 nt, synthetic construct
  source 1..16: mol_type = other RNA
aaataaataaaaatat

SEQ ID NO: 3083 - RNA, 16 nt, synthetic construct
  source 1..16: mol_type = other RNA
aaataaaaataaatat

SEQ ID NO: 3084 - RNA, 16 nt, synthetic construct
  source 1..16: mol_type = other RNA
aaaataaataaataat

SEQ ID NO: 3085 - RNA, 16 nt, synthetic construct
  source 1..16: mol_type = other RNA
aaaaaataaaaatata

SEQ ID NO: 3086 - RNA, 16 nt, synthetic construct
  source 1..16: mol_type = other RNA
aaaataaaaaaatata

SEQ ID NO: 3087 - RNA, 16 nt, synthetic construct
  source 1..16: mol_type = other RNA
aaaaaaataaaatata

SEQ ID NO: 3088 - RNA, 16 nt, synthetic construct
  source 1..16: mol_type = other RNA
aaaaataaaaaatata

SEQ ID NO: 3089 - RNA, 16 nt, synthetic construct
  source 1..16: mol_type = other RNA
aaaaaaaaaaatatat

SEQ ID NO: 3090 - RNA, 16 nt, synthetic construct
  source 1..16: mol_type = other RNA
aaatataaataatata

SEQ ID NO: 3091 - RNA, 16 nt, synthetic construct
  source 1..16: mol_type = other RNA
aaataaatataatata

SEQ ID NO: 3092 - RNA, 16 nt, synthetic construct
  source 1..16: mol_type = other RNA
aaataatataaatata

SEQ ID NO: 3093 - RNA, 16 nt, synthetic construct
  source 1..16: mol_type = other RNA
aaatataataaatata

SEQ ID NO: 3094 - RNA, 16 nt, synthetic construct
  source 1..16: mol_type = other RNA
aaaaaaaaaaaaaaaa

SEQ ID NO: 3095 - RNA, 16 nt, synthetic construct
  source 1..16: mol_type = other RNA
aaaaaaataaatatat

SEQ ID NO: 3096 - RNA, 16 nt, synthetic construct
  source 1..16: mol_type = other RNA
taaataaataaataaa

SEQ ID NO: 3097 - RNA, 16 nt, synthetic construct
  source 1..16: mol_type = other RNA
aataaataaataaata

SEQ ID NO: 3098 - RNA, 16 nt, synthetic construct
  source 1..16: mol_type = other RNA
aaatataaatatataa

SEQ ID NO: 3099 - RNA, 16 nt, synthetic construct
  source 1..16: mol_type = other RNA
aaatatataaatataa

SEQ ID NO: 3100 - RNA, 16 nt, synthetic construct
  source 1..16: mol_type = other RNA
aaataaataaataaat

SEQ ID NO: 3101 - RNA, 16 nt, synthetic construct
  source 1..16: mol_type = other RNA
ataaataaataaataa

SEQ ID NO: 3102 - RNA, 16 nt, synthetic construct
  source 1..16: mol_type = other RNA
aaaaaaaatataaata

SEQ ID NO: 3103 - RNA, 16 nt, synthetic construct
  source 1..16: mol_type = other RNA
aaataataaatatata

SEQ ID NO: 3104 - RNA, 16 nt, synthetic construct
  source 1..16: mol_type = other RNA
aaataaataatatata

SEQ ID NO: 3105 - RNA, 16 nt, synthetic construct
  source 1..16: mol_type = other RNA
aaaatataaataaata

SEQ ID NO: 3106 - RNA, 16 nt, synthetic construct
  source 1..16: mol_type = other RNA
aaaataaatataaata

SEQ ID NO: 3107 - RNA, 16 nt, synthetic construct
  source 1..16: mol_type = other RNA
aaataaaaaaaaaata

SEQ ID NO: 3108 - RNA, 16 nt, synthetic construct
  source 1..16: mol_type = other RNA
aaataaatatatataa

SEQ ID NO: 3109 - RNA, 16 nt, synthetic construct
  source 1..16: mol_type = other RNA
aaatatatataaataa

SEQ ID NO: 3110 - RNA, 16 nt, synthetic construct
  source 1..16: mol_type = other RNA
ataaataaataaatat

SEQ ID NO: 3111 - RNA, 16 nt, synthetic construct
  source 1..16: mol_type = other RNA
aaataaaaaataaata

SEQ ID NO: 3112 - RNA, 16 nt, synthetic construct
  source 1..16: mol_type = other RNA
aaataaataaaaaata

SEQ ID NO: 3113 - RNA, 16 nt, synthetic construct
  source 1..16: mol_type = other RNA
aataaataaatataaa

SEQ ID NO: 3114 - RNA, 16 nt, synthetic construct
  source 1..16: mol_type = other RNA
aatataaataaataaa

SEQ ID NO: 3115 - RNA, 16 nt, synthetic construct
  source 1..16: mol_type = other RNA
aataaatataaataaa

SEQ ID NO: 3116 - RNA, 16 nt, synthetic construct
  source 1..16: mol_type = other RNA
aaaaatataaatataa

SEQ ID NO: 3117 - RNA, 16 nt, synthetic construct
  source 1..16: mol_type = other RNA
aaaatataaatataaa

SEQ ID NO: 3118 - RNA, 16 nt, synthetic construct
  source 1..16: mol_type = other RNA
aaatataaaatatata

SEQ ID NO: 3119 - RNA, 16 nt, synthetic construct
  source 1..16: mol_type = other RNA
aaatatataaaatata

SEQ ID NO: 3120 - RNA, 16 nt, synthetic construct
  source 1..16: mol_type = other RNA
aaaaaaaaataatata

SEQ ID NO: 3121 - RNA, 16 nt, synthetic construct
  source 1..16: mol_type = other RNA
aaatataaatatatat

SEQ ID NO: 3122 - RNA, 16 nt, synthetic construct
  source 1..16: mol_type = other RNA
aaatatatataaatat

SEQ ID NO: 3123 - RNA, 16 nt, synthetic construct
  source 1..16: mol_type = other RNA
aaatatataaatatat

SEQ ID NO: 3124 - RNA, 16 nt, synthetic construct
  source 1..16: mol_type = other RNA
aaataaaaaaatataa

SEQ ID NO: 3125 - RNA, 16 nt, synthetic construct
  source 1..16: mol_type = other RNA
aaatataaaaaaataa

SEQ ID NO: 3126 - RNA, 16 nt, synthetic construct
  source 1..16: mol_type = other RNA
aaaaataataaatata

SEQ ID NO: 3127 - RNA, 16 nt, synthetic construct
  source 1..16: mol_type = other RNA
aaaaataaataatata

SEQ ID NO: 3128 - RNA, 16 nt, synthetic construct
  source 1..16: mol_type = other RNA
aaataaaaaatataaa

SEQ ID NO: 3129 - RNA, 16 nt, synthetic construct
  source 1..16: mol_type = other RNA
aaatataaaaaataaa

SEQ ID NO: 3130 - RNA, 16 nt, synthetic construct
  source 1..16: mol_type = other RNA
aaaaaaaaatatataa

SEQ ID NO: 3131 - RNA, 16 nt, synthetic construct
  source 1..16: mol_type = other RNA
aaaaataaatatataa

SEQ ID NO: 3132 - RNA, 16 nt, synthetic construct
  source 1..16: mol_type = other RNA
aaaaatatataaataa

SEQ ID NO: 3133 - RNA, 16 nt, synthetic construct
  source 1..16: mol_type = other RNA
aataaaaaaaaatata

SEQ ID NO: 3134 - RNA, 16 nt, synthetic construct
  source 1..16: mol_type = other RNA
aaaaaaaatatataaa

SEQ ID NO: 3135 - RNA, 16 nt, synthetic construct
  source 1..16: mol_type = other RNA
aaaataaatatataaa

SEQ ID NO: 3136 - RNA, 16 nt, synthetic construct
  source 1..16: mol_type = other RNA
aaaatatataaataaa

SEQ ID NO: 3137 - RNA, 16 nt, synthetic construct
  source 1..16: mol_type = other RNA
aataaaaataaatata

SEQ ID NO: 3138 - RNA, 16 nt, synthetic construct
  source 1..16: mol_type = other RNA
aaataaaatatatata

SEQ ID NO: 3139 - RNA, 16 nt, synthetic construct
  source 1..16: mol_type = other RNA
aataaataaaaatata

SEQ ID NO: 3140 - RNA, 16 nt, synthetic construct
  source 1..16: mol_type = other RNA
aaataaatatatatat

SEQ ID NO: 3141 - RNA, 16 nt, synthetic construct
  source 1..16: mol_type = other RNA
aaaaaaaaaatataat

SEQ ID NO: 3142 - RNA, 16 nt, synthetic construct
  source 1..16: mol_type = other RNA
aaatataaaaaaatat

SEQ ID NO: 3143 - RNA, 16 nt, synthetic construct
  source 1..16: mol_type = other RNA
aaaaaataaatataat

SEQ ID NO: 3144 - RNA, 16 nt, synthetic construct
  source 1..16: mol_type = other RNA
aaaaaatataaataat

SEQ ID NO: 3145 - RNA, 16 nt, synthetic construct
  source 1..16: mol_type = other RNA
aaaaaatatatatata

SEQ ID NO: 3146 - RNA, 16 nt, synthetic construct
  source 1..16: mol_type = other RNA
taaatataaatatata

SEQ ID NO: 3147 - RNA, 16 nt, synthetic construct
  source 1..16: mol_type = other RNA
taaatatataaatata

SEQ ID NO: 3148 - RNA, 16 nt, synthetic construct
  source 1..16: mol_type = other RNA
aaaatataaaaatata

SEQ ID NO: 3149 - RNA, 16 nt, synthetic construct
  source 1..16: mol_type = other RNA
aaaaatataaaatata

SEQ ID NO: 3150 - RNA, 16 nt, synthetic construct
  source 1..16: mol_type = other RNA
aaaaatatataaatat

SEQ ID NO: 3151 - RNA, 16 nt, synthetic construct
  source 1..16: mol_type = other RNA
aaaaatataaatatat

SEQ ID NO: 3152 - RNA, 16 nt, synthetic construct
  source 1..16: mol_type = other RNA
aaataataaataaata

SEQ ID NO: 3153 - RNA, 16 nt, synthetic construct
  source 1..16: mol_type = other RNA
aaataaataataaata

SEQ ID NO: 3154 - RNA, 16 nt, synthetic construct
  source 1..16: mol_type = other RNA
aaataaataaataata

SEQ ID NO: 3155 - RNA, 16 nt, synthetic construct
  source 1..16: mol_type = other RNA
aaataaaaaaaataat

SEQ ID NO: 3156 - RNA, 16 nt, synthetic construct
  source 1..16: mol_type = other RNA
aaataaaataaataat

SEQ ID NO: 3157 - RNA, 16 nt, synthetic construct
  source 1..16: mol_type = other RNA
aaataaataaaataat

SEQ ID NO: 3158 - RNA, 16 nt, synthetic construct
  source 1..16: mol_type = other RNA
aaaaaaaaaaaatatt

SEQ ID NO: 3159 - RNA, 16 nt, synthetic construct
  source 1..16: mol_type = other RNA
aaatataaataaatac

SEQ ID NO: 3160 - RNA, 16 nt, synthetic construct
  source 1..16: mol_type = other RNA
aaataaatataaatac

SEQ ID NO: 3161 - RNA, 16 nt, synthetic construct
  source 1..16: mol_type = other RNA
aaaaaaaataaatatt

SEQ ID NO: 3162 - RNA, 16 nt, synthetic construct
  source 1..16: mol_type = other RNA
aaaataaataaatatt

SEQ ID NO: 3163 - RNA, 16 nt, synthetic construct
  source 1..16: mol_type = other RNA
aaataaaaaaatatat

SEQ ID NO: 3164 - RNA, 16 nt, synthetic construct
  source 1..16: mol_type = other RNA
aaataaaaaaaaaaaa

SEQ ID NO: 3165 - RNA, 16 nt, synthetic construct
  source 1..16: mol_type = other RNA
taaataaatatatata

SEQ ID NO: 3166 - RNA, 16 nt, synthetic construct
  source 1..16: mol_type = other RNA
aaataaataaaaaaaa

SEQ ID NO: 3167 - RNA, 16 nt, synthetic construct
  source 1..16: mol_type = other RNA
aaataaataaatatag

SEQ ID NO: 3168 - RNA, 16 nt, synthetic construct
  source 1..16: mol_type = other RNA
aaaataaaaatatata

SEQ ID NO: 3169 - RNA, 16 nt, synthetic construct
  source 1..16: mol_type = other RNA
aaaaataaaatatata

SEQ ID NO: 3170 - RNA, 16 nt, synthetic construct
  source 1..16: mol_type = other RNA
aaataaataaataaaa

SEQ ID NO: 3171 - RNA, 16 nt, synthetic construct
  source 1..16: mol_type = other RNA
aaaaaaaaatatatat

SEQ ID NO: 3172 - RNA, 16 nt, synthetic construct
  source 1..16: mol_type = other RNA
aaaaaaaaaaatatac

SEQ ID NO: 3173 - RNA, 16 nt, synthetic construct
  source 1..16: mol_type = other RNA
aaaaataaatatatat

SEQ ID NO: 3174 - RNA, 16 nt, synthetic construct
  source 1..16: mol_type = other RNA
aaaataaaaaaaataa

SEQ ID NO: 3175 - RNA, 16 nt, synthetic construct
  source 1..16: mol_type = other RNA
aaaaaaaataaaataa

SEQ ID NO: 3176 - RNA, 16 nt, synthetic construct
  source 1..16: mol_type = other RNA
aaaaaataaaaaataa

SEQ ID NO: 3177 - RNA, 16 nt, synthetic construct
  source 1..16: mol_type = other RNA
aaaaataaaaaaataa

SEQ ID NO: 3178 - RNA, 16 nt, synthetic construct
  source 1..16: mol_type = other RNA
aaaaaaataaaaataa

SEQ ID NO: 3179 - RNA, 16 nt, synthetic construct
  source 1..16: mol_type = other RNA
aaaaaaataaatatac

SEQ ID NO: 3180 - RNA, 16 nt, synthetic construct
  source 1..16: mol_type = other RNA
aaaataaataaaataa

SEQ ID NO: 3181 - RNA, 16 nt, synthetic construct
  source 1..16: mol_type = other RNA
aaaataaaataaataa

SEQ ID NO: 3182 - RNA, 16 nt, synthetic construct
  source 1..16: mol_type = other RNA
aaatataaaaaaaata

SEQ ID NO: 3183 - RNA, 16 nt, synthetic construct
  source 1..16: mol_type = other RNA
aaaaaataaaaataaa

SEQ ID NO: 3184 - RNA, 16 nt, synthetic construct
  source 1..16: mol_type = other RNA
aaaaaaataaaataaa

SEQ ID NO: 3185 - RNA, 16 nt, synthetic construct
  source 1..16: mol_type = other RNA
aaaataaaaaaataaa

SEQ ID NO: 3186 - RNA, 16 nt, synthetic construct
  source 1..16: mol_type = other RNA
aaaaataaaaaataaa

SEQ ID NO: 3187 - RNA, 16 nt, synthetic construct
  source 1..16: mol_type = other RNA
aaataataaatataaa

SEQ ID NO: 3188 - RNA, 16 nt, synthetic construct
  source 1..16: mol_type = other RNA
aaataaataatataaa

SEQ ID NO: 3189 - RNA, 16 nt, synthetic construct
  source 1..16: mol_type = other RNA
aaatataaaataaata

SEQ ID NO: 3190 - RNA, 16 nt, synthetic construct
  source 1..16: mol_type = other RNA
aaataaaatataaata

SEQ ID NO: 3191 - RNA, 16 nt, synthetic construct
  source 1..16: mol_type = other RNA
aaatataataaataaa

SEQ ID NO: 3192 - RNA, 16 nt, synthetic construct
  source 1..16: mol_type = other RNA
aaataaatataaaata

SEQ ID NO: 3193 - RNA, 16 nt, synthetic construct
  source 1..16: mol_type = other RNA
aaatataaataataaa

SEQ ID NO: 3194 - RNA, 16 nt, synthetic construct
  source 1..16: mol_type = other RNA
aaataatataaataaa

SEQ ID NO: 3195 - RNA, 16 nt, synthetic construct
  source 1..16: mol_type = other RNA
aaataaatataataaa

SEQ ID NO: 3196 - RNA, 16 nt, synthetic construct
  source 1..16: mol_type = other RNA
aaatataaataaaata

SEQ ID NO: 3197 - RNA, 16 nt, synthetic construct
  source 1..16: mol_type = other RNA
taaataaataaataat

SEQ ID NO: 3198 - RNA, 16 nt, synthetic construct
  source 1..16: mol_type = other RNA
taaaaaaaaaaatata

SEQ ID NO: 3199 - RNA, 16 nt, synthetic construct
  source 1..16: mol_type = other RNA
taaaaaaataaatata

SEQ ID NO: 3200 - RNA, 16 nt, synthetic construct
  source 1..16: mol_type = other RNA
taaataaaaaaatata

SEQ ID NO: 3201 - RNA, 16 nt, synthetic construct
  source 1..16: mol_type = other RNA
aaaaaatatataaata

SEQ ID NO: 3202 - RNA, 16 nt, synthetic construct
  source 1..16: mol_type = other RNA
aatataaatatatata

SEQ ID NO: 3203 - RNA, 16 nt, synthetic construct
  source 1..16: mol_type = other RNA
aatatatataaatata

SEQ ID NO: 3204 - RNA, 16 nt, synthetic construct
  source 1..16: mol_type = other RNA
ataaaaaaaaaatata

SEQ ID NO: 3205 - RNA, 16 nt, synthetic construct
  source 1..16: mol_type = other RNA
aatatataaatatata

SEQ ID NO: 3206 - RNA, 16 nt, synthetic construct
  source 1..16: mol_type = other RNA
aaaaaataaaaaatat

SEQ ID NO: 3207 - RNA, 16 nt, synthetic construct
  source 1..16: mol_type = other RNA
aaaaataaaaaaatat

SEQ ID NO: 3208 - RNA, 16 nt, synthetic construct
  source 1..16: mol_type = other RNA
aaaataaaaaaaatat

SEQ ID NO: 3209 - RNA, 16 nt, synthetic construct
  source 1..16: mol_type = other RNA
aaaaaaaataaaatat

SEQ ID NO: 3210 - RNA, 16 nt, synthetic construct
  source 1..16: mol_type = other RNA
aaaaaaataaaaatat

SEQ ID NO: 3211 - RNA, 16 nt, synthetic construct
  source 1..16: mol_type = other RNA
ataaaaaataaatata

SEQ ID NO: 3212 - RNA, 16 nt, synthetic construct
  source 1..16: mol_type = other RNA
ataaataaaaaatata

SEQ ID NO: 3213 - RNA, 16 nt, synthetic construct
  source 1..16: mol_type = other RNA
aaaataaataaaatat

SEQ ID NO: 3214 - RNA, 16 nt, synthetic construct
  source 1..16: mol_type = other RNA
aaaataaaataaatat

SEQ ID NO: 3215 - RNA, 16 nt, synthetic construct
  source 1..16: mol_type = other RNA
aaaaaaatataatata

SEQ ID NO: 3216 - RNA, 16 nt, synthetic construct
  source 1..16: mol_type = other RNA
aaatataaaaatataa

SEQ ID NO: 3217 - RNA, 16 nt, synthetic construct
  source 1..16: mol_type = other RNA
aaaaaaaaaaaaaaat

SEQ ID NO: 3218 - RNA, 16 nt, synthetic construct
  source 1..16: mol_type = other RNA
aaaaaaaaaaaaatac

SEQ ID NO: 3219 - RNA, 16 nt, synthetic construct
  source 1..16: mol_type = other RNA
aaaaaaaaaaataaat

SEQ ID NO: 3220 - RNA, 16 nt, synthetic construct
  source 1..16: mol_type = other RNA
aaatataaaatataaa

SEQ ID NO: 3221 - RNA, 16 nt, synthetic construct
  source 1..16: mol_type = other RNA
aaaaaaaaataaatac

SEQ ID NO: 3222 - RNA, 16 nt, synthetic construct
  source 1..16: mol_type = other RNA
aaaaaaataaataaat

SEQ ID NO: 3223 - RNA, 16 nt, synthetic construct
  source 1..16: mol_type = other RNA
taaatataaataaata

SEQ ID NO: 3224 - RNA, 16 nt, synthetic construct
  source 1..16: mol_type = other RNA
taaataaatataaata

SEQ ID NO: 3225 - RNA, 16 nt, synthetic construct
  source 1..16: mol_type = other RNA
aaaaataaataaatac

SEQ ID NO: 3226 - RNA, 16 nt, synthetic construct
  source 1..16: mol_type = other RNA
aatataaataaataat

SEQ ID NO: 3227 - RNA, 16 nt, synthetic construct
  source 1..16: mol_type = other RNA
aataaatataaataat

SEQ ID NO: 3228 - RNA, 16 nt, synthetic construct
  source 1..16: mol_type = other RNA
aataaataaatataat

SEQ ID NO: 3229 - RNA, 17 nt, synthetic construct
  source 1..17: mol_type = other RNA
aaatataaataaatata

SEQ ID NO: 3230 - RNA, 17 nt, synthetic construct
  source 1..17: mol_type = other RNA
aaataaatataaatata

SEQ ID NO: 3231 - RNA, 17 nt, synthetic construct
  source 1..17: mol_type = other RNA
aaataaataaatatata

SEQ ID NO: 3232 - RNA, 17 nt, synthetic construct
  source 1..17: mol_type = other RNA
aaaaaaaaaaaaatata

SEQ ID NO: 3233 - RNA, 17 nt, synthetic construct
  source 1..17: mol_type = other RNA
aaaaaaaaataaatata

SEQ ID NO: 3234 - RNA, 17 nt, synthetic construct
  source 1..17: mol_type = other RNA
aaaaataaataaatata

SEQ ID NO: 3235 - RNA, 17 nt, synthetic construct
  source 1..17: mol_type = other RNA
aaataaataaataaata

SEQ ID NO: 3236 - RNA, 17 nt, synthetic construct
  source 1..17: mol_type = other RNA
aaatataaataaataaa

SEQ ID NO: 3237 - RNA, 17 nt, synthetic construct
  source 1..17: mol_type = other RNA
aaataaatataaataaa

SEQ ID NO: 3238 - RNA, 17 nt, synthetic construct
  source 1..17: mol_type = other RNA
aaataaataaatataaa

SEQ ID NO: 3239 - RNA, 17 nt, synthetic construct
  source 1..17: mol_type = other RNA
aaaaaaatataaatata

SEQ ID NO: 3240 - RNA, 17 nt, synthetic construct
  source 1..17: mol_type = other RNA
aaataaaaaaaaatata

SEQ ID NO: 3241 - RNA, 17 nt, synthetic construct
  source 1..17: mol_type = other RNA
aaataaaaataaatata

SEQ ID NO: 3242 - RNA, 17 nt, synthetic construct
  source 1..17: mol_type = other RNA
aaataaataaaaatata

SEQ ID NO: 3243 - RNA, 17 nt, synthetic construct
  source 1..17: mol_type = other RNA
aaaaaaaaaaatatata

SEQ ID NO: 3244 - RNA, 17 nt, synthetic construct
  source 1..17: mol_type = other RNA
aaaaaaataaatatata

SEQ ID NO: 3245 - RNA, 17 nt, synthetic construct
  source 1..17: mol_type = other RNA
aaaaaaaaaaaaaataa

SEQ ID NO: 3246 - RNA, 17 nt, synthetic construct
  source 1..17: mol_type = other RNA
aaaaaaaaaataaataa

SEQ ID NO: 3247 - RNA, 17 nt, synthetic construct
  source 1..17: mol_type = other RNA
aaaaaataaataaataa

SEQ ID NO: 3248 - RNA, 17 nt, synthetic construct
  source 1..17: mol_type = other RNA
aaaaaaaaaaaaataaa

SEQ ID NO: 3249 - RNA, 17 nt, synthetic construct
  source 1..17: mol_type = other RNA
aaaaaaaaataaataaa

SEQ ID NO: 3250 - RNA, 17 nt, synthetic construct
  source 1..17: mol_type = other RNA
aaaaataaataaataaa

SEQ ID NO: 3251 - RNA, 17 nt, synthetic construct
  source 1..17: mol_type = other RNA
aaaaaaaaaaaaaatat

SEQ ID NO: 3252 - RNA, 17 nt, synthetic construct
  source 1..17: mol_type = other RNA
aaaaaaaaaataaatat

SEQ ID NO: 3253 - RNA, 17 nt, synthetic construct
  source 1..17: mol_type = other RNA
aaaaaataaataaatat

SEQ ID NO: 3254 - RNA, 17 nt, synthetic construct
  source 1..17: mol_type = other RNA
ataaataaataaatata

SEQ ID NO: 3255 - RNA, 17 nt, synthetic construct
  source 1..17: mol_type = other RNA
aaatataaatatatata

SEQ ID NO: 3256 - RNA, 17 nt, synthetic construct
  source 1..17: mol_type = other RNA
aaatatataaatatata

SEQ ID NO: 3257 - RNA, 17 nt, synthetic construct
  source 1..17: mol_type = other RNA
aaatatatataaatata

SEQ ID NO: 3258 - RNA, 17 nt, synthetic construct
  source 1..17: mol_type = other RNA
aaaaaaaaaaaaaaata

SEQ ID NO: 3259 - RNA, 17 nt, synthetic construct
  source 1..17: mol_type = other RNA
aaaaaaaaaaataaata

SEQ ID NO: 3260 - RNA, 17 nt, synthetic construct
  source 1..17: mol_type = other RNA
aaaaaaataaataaata

SEQ ID NO: 3261 - RNA, 17 nt, synthetic construct
  source 1..17: mol_type = other RNA
aaataaataaatataat

SEQ ID NO: 3262 - RNA, 17 nt, synthetic construct
  source 1..17: mol_type = other RNA
aaatataaataaataat

SEQ ID NO: 3263 - RNA, 17 nt, synthetic construct
  source 1..17: mol_type = other RNA
aaataaatataaataat

SEQ ID NO: 3264 - RNA, 17 nt, synthetic construct
  source 1..17: mol_type = other RNA
aaataaatatatatata

SEQ ID NO: 3265 - RNA, 17 nt, synthetic construct
  source 1..17: mol_type = other RNA
aaatataaaaaaatata

SEQ ID NO: 3266 - RNA, 17 nt, synthetic construct
  source 1..17: mol_type = other RNA
aataaataaataaataa

SEQ ID NO: 3267 - RNA, 17 nt, synthetic construct
  source 1..17: mol_type = other RNA
aaaaatatataaatata

SEQ ID NO: 3268 - RNA, 17 nt, synthetic construct
  source 1..17: mol_type = other RNA
aaaaatataaatatata

SEQ ID NO: 3269 - RNA, 17 nt, synthetic construct
  source 1..17: mol_type = other RNA
aaaaaaaaaaaatataa

SEQ ID NO: 3270 - RNA, 17 nt, synthetic construct
  source 1..17: mol_type = other RNA
aaaaaaaataaatataa

SEQ ID NO: 3271 - RNA, 17 nt, synthetic construct
  source 1..17: mol_type = other RNA
aaaaaaaatataaataa

SEQ ID NO: 3272 - RNA, 17 nt, synthetic construct
  source 1..17: mol_type = other RNA
aaaataaataaatataa

SEQ ID NO: 3273 - RNA, 17 nt, synthetic construct
  source 1..17: mol_type = other RNA
aaaatataaataaataa

SEQ ID NO: 3274 - RNA, 17 nt, synthetic construct
  source 1..17: mol_type = other RNA
aaaataaatataaataa

SEQ ID NO: 3275 - RNA, 17 nt, synthetic construct
  source 1..17: mol_type = other RNA
aaaaaaaaaaatataaa

SEQ ID NO: 3276 - RNA, 17 nt, synthetic construct
  source 1..17: mol_type = other RNA
aaaaaaatataaataaa

SEQ ID NO: 3277 - RNA, 17 nt, synthetic construct
  source 1..17: mol_type = other RNA
aaaaaaataaatataaa

SEQ ID NO: 3278 - RNA, 17 nt, synthetic construct
  source 1..17: mol_type = other RNA
aaataaaaaaatatata

SEQ ID NO: 3279 - RNA, 17 nt, synthetic construct
  source 1..17: mol_type = other RNA
aaatataaatataaata

SEQ ID NO: 3280 - RNA, 17 nt, synthetic construct
  source 1..17: mol_type = other RNA
aaataaaaaaaaaataa

SEQ ID NO: 3281 - RNA, 17 nt, synthetic construct
  source 1..17: mol_type = other RNA
aataaataaataaatat

SEQ ID NO: 3282 - RNA, 17 nt, synthetic construct
  source 1..17: mol_type = other RNA
aaataaaaaataaataa

SEQ ID NO: 3283 - RNA, 17 nt, synthetic construct
  source 1..17: mol_type = other RNA
aaataaataaaaaataa

SEQ ID NO: 3284 - RNA, 17 nt, synthetic construct
  source 1..17: mol_type = other RNA
aaaaaaaaatatatata

SEQ ID NO: 3285 - RNA, 17 nt, synthetic construct
  source 1..17: mol_type = other RNA
aaaaataaatatatata

SEQ ID NO: 3286 - RNA, 17 nt, synthetic construct
  source 1..17: mol_type = other RNA
aaataaaaaaaaataaa

SEQ ID NO: 3287 - RNA, 17 nt, synthetic construct
  source 1..17: mol_type = other RNA
aaataaaaataaataaa

SEQ ID NO: 3288 - RNA, 17 nt, synthetic construct
  source 1..17: mol_type = other RNA
aaataaataaaaataaa

SEQ ID NO: 3289 - RNA, 17 nt, synthetic construct
  source 1..17: mol_type = other RNA
aaaaaaaatataaatat

SEQ ID NO: 3290 - RNA, 17 nt, synthetic construct
  source 1..17: mol_type = other RNA
aaaataaatataaatat

SEQ ID NO: 3291 - RNA, 17 nt, synthetic construct
  source 1..17: mol_type = other RNA
aaaatataaataaatat

SEQ ID NO: 3292 - RNA, 17 nt, synthetic construct
  source 1..17: mol_type = other RNA
aaatatataaataaata

SEQ ID NO: 3293 - RNA, 17 nt, synthetic construct
  source 1..17: mol_type = other RNA
aaataaatatataaata

SEQ ID NO: 3294 - RNA, 17 nt, synthetic construct
  source 1..17: mol_type = other RNA
aaaaaaaaaaaaataat

SEQ ID NO: 3295 - RNA, 17 nt, synthetic construct
  source 1..17: mol_type = other RNA
aaataaaaaaaaaatat

SEQ ID NO: 3296 - RNA, 17 nt, synthetic construct
  source 1..17: mol_type = other RNA
aaaaaaaaataaataat

SEQ ID NO: 3297 - RNA, 17 nt, synthetic construct
  source 1..17: mol_type = other RNA
aaataaaaaataaatat

SEQ ID NO: 3298 - RNA, 17 nt, synthetic construct
  source 1..17: mol_type = other RNA
aaataaataaaaaatat

SEQ ID NO: 3299 - RNA, 17 nt, synthetic construct
  source 1..17: mol_type = other RNA
aaaaataaataaataat

SEQ ID NO: 3300 - RNA, 17 nt, synthetic construct
  source 1..17: mol_type = other RNA
aaaaataaaaaaatata

SEQ ID NO: 3301 - RNA, 17 nt, synthetic construct
  source 1..17: mol_type = other RNA
aaaataaaaaaaatata

SEQ ID NO: 3302 - RNA, 17 nt, synthetic construct
  source 1..17: mol_type = other RNA
aaaaaataaaaaatata

SEQ ID NO: 3303 - RNA, 17 nt, synthetic construct
  source 1..17: mol_type = other RNA
aaaaaaaataaaatata

SEQ ID NO: 3304 - RNA, 17 nt, synthetic construct
  source 1..17: mol_type = other RNA
aaaaaaataaaaatata

SEQ ID NO: 3305 - RNA, 17 nt, synthetic construct
  source 1..17: mol_type = other RNA
aaaaaaaaaaaatatat

SEQ ID NO: 3306 - RNA, 17 nt, synthetic construct
  source 1..17: mol_type = other RNA
aaaataaataaaatata

SEQ ID NO: 3307 - RNA, 17 nt, synthetic construct
  source 1..17: mol_type = other RNA
aaaataaaataaatata

SEQ ID NO: 3308 - RNA, 17 nt, synthetic construct
  source 1..17: mol_type = other RNA
aaaaaaaaaaaaaaaaa

SEQ ID NO: 3309 - RNA, 17 nt, synthetic construct
  source 1..17: mol_type = other RNA
aaaaaaaataaatatat

SEQ ID NO: 3310 - RNA, 17 nt, synthetic construct
  source 1..17: mol_type = other RNA
aaaataaataaatatat

SEQ ID NO: 3311 - RNA, 17 nt, synthetic construct
  source 1..17: mol_type = other RNA
ataaataaataaataaa

SEQ ID NO: 3312 - RNA, 17 nt, synthetic construct
  source 1..17: mol_type = other RNA
aaatatataaatataaa

SEQ ID NO: 3313 - RNA, 17 nt, synthetic construct
  source 1..17: mol_type = other RNA
aaatataaatatataaa

SEQ ID NO: 3314 - RNA, 17 nt, synthetic construct
  source 1..17: mol_type = other RNA
aaaaaaaaatataaata

SEQ ID NO: 3315 - RNA, 17 nt, synthetic construct
  source 1..17: mol_type = other RNA
aaaaatataaataaata

SEQ ID NO: 3316 - RNA, 17 nt, synthetic construct
  source 1..17: mol_type = other RNA
aaaaataaatataaata

SEQ ID NO: 3317 - RNA, 17 nt, synthetic construct
  source 1..17: mol_type = other RNA
aaataaataataaataa

SEQ ID NO: 3318 - RNA, 17 nt, synthetic construct
  source 1..17: mol_type = other RNA
aaataaataaataataa

SEQ ID NO: 3319 - RNA, 17 nt, synthetic construct
  source 1..17: mol_type = other RNA
aaataataaataaataa

SEQ ID NO: 3320 - RNA, 17 nt, synthetic construct
  source 1..17: mol_type = other RNA
aaataaaaaaaaaaata

SEQ ID NO: 3321 - RNA, 17 nt, synthetic construct
  source 1..17: mol_type = other RNA
aaataaataaaaaaata

SEQ ID NO: 3322 - RNA, 17 nt, synthetic construct
  source 1..17: mol_type = other RNA
aaataaaaaaataaata

SEQ ID NO: 3323 - RNA, 17 nt, synthetic construct
  source 1..17: mol_type = other RNA
aaatatatataaataaa

SEQ ID NO: 3324 - RNA, 17 nt, synthetic construct
  source 1..17: mol_type = other RNA
aaataaatatatataaa

SEQ ID NO: 3325 - RNA, 17 nt, synthetic construct
  source 1..17: mol_type = other RNA
aaatataaataaatatt

SEQ ID NO: 3326 - RNA, 17 nt, synthetic construct
  source 1..17: mol_type = other RNA
aaataaatataaatatt

SEQ ID NO: 3327 - RNA, 17 nt, synthetic construct
  source 1..17: mol_type = other RNA
aaaaaatataaatataa

SEQ ID NO: 3328 - RNA, 17 nt, synthetic construct
  source 1..17: mol_type = other RNA
atataaatataaatata

SEQ ID NO: 3329 - RNA, 17 nt, synthetic construct
  source 1..17: mol_type = other RNA
aaaaatataaatataaa

SEQ ID NO: 3330 - RNA, 17 nt, synthetic construct
  source 1..17: mol_type = other RNA
aaatataaaaatatata

SEQ ID NO: 3331 - RNA, 17 nt, synthetic construct
  source 1..17: mol_type = other RNA
aaatatataaaaatata

SEQ ID NO: 3332 - RNA, 17 nt, synthetic construct
  source 1..17: mol_type = other RNA
aaataaataataaatat

SEQ ID NO: 3333 - RNA, 17 nt, synthetic construct
  source 1..17: mol_type = other RNA
aaataataaataaatat

SEQ ID NO: 3334 - RNA, 17 nt, synthetic construct
  source 1..17: mol_type = other RNA
aaataaataaataatat

SEQ ID NO: 3335 - RNA, 17 nt, synthetic construct
  source 1..17: mol_type = other RNA
aaaaaaaaaataatata

SEQ ID NO: 3336 - RNA, 17 nt, synthetic construct
  source 1..17: mol_type = other RNA
aaataaaaaaaatataa

SEQ ID NO: 3337 - RNA, 17 nt, synthetic construct
  source 1..17: mol_type = other RNA
aaatataaaaaaaataa

SEQ ID NO: 3338 - RNA, 17 nt, synthetic construct
  source 1..17: mol_type = other RNA
aaaaaataaataatata

SEQ ID NO: 3339 - RNA, 17 nt, synthetic construct
  source 1..17: mol_type = other RNA
aaaaaataataaatata

SEQ ID NO: 3340 - RNA, 17 nt, synthetic construct
  source 1..17: mol_type = other RNA
aaatataaaataaataa

SEQ ID NO: 3341 - RNA, 17 nt, synthetic construct
  source 1..17: mol_type = other RNA
aaataaaataaatataa

SEQ ID NO: 3342 - RNA, 17 nt, synthetic construct
  source 1..17: mol_type = other RNA
aaataaaatataaataa

SEQ ID NO: 3343 - RNA, 17 nt, synthetic construct
  source 1..17: mol_type = other RNA
aaatataaataaaataa

SEQ ID NO: 3344 - RNA, 17 nt, synthetic construct
  source 1..17: mol_type = other RNA
aaataaatataaaataa

SEQ ID NO: 3345 - RNA, 17 nt, synthetic construct
  source 1..17: mol_type = other RNA
aaataaataaaatataa

SEQ ID NO: 3346 - RNA, 17 nt, synthetic construct
  source 1..17: mol_type = other RNA
aaatataaaaaaataaa

SEQ ID NO: 3347 - RNA, 17 nt, synthetic construct
  source 1..17: mol_type = other RNA
aaataaaaaaatataaa

SEQ ID NO: 3348 - RNA, 17 nt, synthetic construct
  source 1..17: mol_type = other RNA
aaaaaaaaaatatataa

SEQ ID NO: 3349 - RNA, 17 nt, synthetic construct
  source 1..17: mol_type = other RNA
aaataaataaatatatt

SEQ ID NO: 3350 - RNA, 17 nt, synthetic construct
  source 1..17: mol_type = other RNA
aaaaaatatataaataa

SEQ ID NO: 3351 - RNA, 17 nt, synthetic construct
  source 1..17: mol_type = other RNA
aaaaaataaatatataa

SEQ ID NO: 3352 - RNA, 17 nt, synthetic construct
  source 1..17: mol_type = other RNA
atatataaataaatata

SEQ ID NO: 3353 - RNA, 17 nt, synthetic construct
  source 1..17: mol_type = other RNA
atataaataaatatata

SEQ ID NO: 3354 - RNA, 17 nt, synthetic construct
  source 1..17: mol_type = other RNA
aataaaaaaaaaatata

SEQ ID NO: 3355 - RNA, 17 nt, synthetic construct
  source 1..17: mol_type = other RNA
aaaaaaaaatatataaa

SEQ ID NO: 3356 - RNA, 17 nt, synthetic construct
  source 1..17: mol_type = other RNA
aataaaaaataaatata

SEQ ID NO: 3357 - RNA, 17 nt, synthetic construct
  source 1..17: mol_type = other RNA
aaaaataaatatataaa

SEQ ID NO: 3358 - RNA, 17 nt, synthetic construct
  source 1..17: mol_type = other RNA
aaaaatatataaataaa

SEQ ID NO: 3359 - RNA, 17 nt, synthetic construct
  source 1..17: mol_type = other RNA
aataaataaaaaatata

SEQ ID NO: 3360 - RNA, 17 nt, synthetic construct
  source 1..17: mol_type = other RNA
aaataaaaatatatata

SEQ ID NO: 3361 - RNA, 17 nt, synthetic construct
  source 1..17: mol_type = other RNA
aaaaaaaaaaatataat

SEQ ID NO: 3362 - RNA, 17 nt, synthetic construct
  source 1..17: mol_type = other RNA
aaatataaaaaaaatat

SEQ ID NO: 3363 - RNA, 17 nt, synthetic construct
  source 1..17: mol_type = other RNA
aaaaaaatataaataat

SEQ ID NO: 3364 - RNA, 17 nt, synthetic construct
  source 1..17: mol_type = other RNA
aaaaaaataaatataat

SEQ ID NO: 3365 - RNA, 17 nt, synthetic construct
  source 1..17: mol_type = other RNA
aaaaaaatatatatata

SEQ ID NO: 3366 - RNA, 17 nt, synthetic construct
  source 1..17: mol_type = other RNA
aaatataaaataaatat

SEQ ID NO: 3367 - RNA, 17 nt, synthetic construct
  source 1..17: mol_type = other RNA
aaataaaatataaatat

SEQ ID NO: 3368 - RNA, 17 nt, synthetic construct
  source 1..17: mol_type = other RNA
aaatataaataaaatat

SEQ ID NO: 3369 - RNA, 17 nt, synthetic construct
  source 1..17: mol_type = other RNA
aaataaatataaaatat

SEQ ID NO: 3370 - RNA, 17 nt, synthetic construct
  source 1..17: mol_type = other RNA
aaaatataaaaaatata

SEQ ID NO: 3371 - RNA, 17 nt, synthetic construct
  source 1..17: mol_type = other RNA
aaaaaatataaaatata

SEQ ID NO: 3372 - RNA, 17 nt, synthetic construct
  source 1..17: mol_type = other RNA
aaaaatataaaaatata

SEQ ID NO: 3373 - RNA, 17 nt, synthetic construct
  source 1..17: mol_type = other RNA
aaaaaatataaatatat

SEQ ID NO: 3374 - RNA, 17 nt, synthetic construct
  source 1..17: mol_type = other RNA
aaaaaatatataaatat

SEQ ID NO: 3375 - RNA, 17 nt, synthetic construct
  source 1..17: mol_type = other RNA
taaatataaataaataa

SEQ ID NO: 3376 - RNA, 17 nt, synthetic construct
  source 1..17: mol_type = other RNA
taaataaatataaataa

SEQ ID NO: 3377 - RNA, 17 nt, synthetic construct
  source 1..17: mol_type = other RNA
taaataaataaatataa

SEQ ID NO: 3378 - RNA, 17 nt, synthetic construct
  source 1..17: mol_type = other RNA
ataaatatataaatata

SEQ ID NO: 3379 - RNA, 17 nt, synthetic construct
  source 1..17: mol_type = other RNA
ataaatataaatatata

SEQ ID NO: 3380 - RNA, 17 nt, synthetic construct
  source 1..17: mol_type = other RNA
aaataaaaaaaaataat

SEQ ID NO: 3381 - RNA, 17 nt, synthetic construct
  source 1..17: mol_type = other RNA
aaataaataaaaataat

SEQ ID NO: 3382 - RNA, 17 nt, synthetic construct
  source 1..17: mol_type = other RNA
aaataaaaataaataat

SEQ ID NO: 3383 - RNA, 17 nt, synthetic construct
  source 1..17: mol_type = other RNA
aaaaaaaaaaaaatatt

SEQ ID NO: 3384 - RNA, 17 nt, synthetic construct
  source 1..17: mol_type = other RNA
aaaaaaaaataaatatt

SEQ ID NO: 3385 - RNA, 17 nt, synthetic construct
  source 1..17: mol_type = other RNA
aaaaataaataaatatt

SEQ ID NO: 3386 - RNA, 17 nt, synthetic construct
  source 1..17: mol_type = other RNA
aaataaaataaaatata

SEQ ID NO: 3387 - RNA, 17 nt, synthetic construct
  source 1..17: mol_type = other RNA
aaataaaaaaaatatat

SEQ ID NO: 3388 - RNA, 17 nt, synthetic construct
  source 1..17: mol_type = other RNA
aaataaaaaaaaaaaaa

SEQ ID NO: 3389 - RNA, 17 nt, synthetic construct
  source 1..17: mol_type = other RNA
aaataaaataaatatat

SEQ ID NO: 3390 - RNA, 17 nt, synthetic construct
  source 1..17: mol_type = other RNA
aaataaataaaatatat

SEQ ID NO: 3391 - RNA, 17 nt, synthetic construct
  source 1..17: mol_type = other RNA
aaataaataaaaaaaaa

SEQ ID NO: 3392 - RNA, 17 nt, synthetic construct
  source 1..17: mol_type = other RNA
aaaaaataaaatatata

SEQ ID NO: 3393 - RNA, 17 nt, synthetic construct
  source 1..17: mol_type = other RNA
aaaataaaaaatatata

SEQ ID NO: 3394 - RNA, 17 nt, synthetic construct
  source 1..17: mol_type = other RNA
aaaaataaaaatatata

SEQ ID NO: 3395 - RNA, 17 nt, synthetic construct
  source 1..17: mol_type = other RNA
aaataaataaataaaaa

SEQ ID NO: 3396 - RNA, 17 nt, synthetic construct
  source 1..17: mol_type = other RNA
aaaaaaaaaatatatat

SEQ ID NO: 3397 - RNA, 17 nt, synthetic construct
  source 1..17: mol_type = other RNA
aaaaaaaaaaaatatac

SEQ ID NO: 3398 - RNA, 17 nt, synthetic construct
  source 1..17: mol_type = other RNA
aaaaaataaatatatat

SEQ ID NO: 3399 - RNA, 17 nt, synthetic construct
  source 1..17: mol_type = other RNA
ataaataaatatatata

SEQ ID NO: 3400 - RNA, 17 nt, synthetic construct
  source 1..17: mol_type = other RNA
aaaaaaaaataaaataa

SEQ ID NO: 3401 - RNA, 17 nt, synthetic construct
  source 1..17: mol_type = other RNA
aaaaaataaaaaaataa

SEQ ID NO: 3402 - RNA, 17 nt, synthetic construct
  source 1..17: mol_type = other RNA
aaaaaaaataaaaataa

SEQ ID NO: 3403 - RNA, 17 nt, synthetic construct
  source 1..17: mol_type = other RNA
aaaaaaataaaaaataa

SEQ ID NO: 3404 - RNA, 17 nt, synthetic construct
  source 1..17: mol_type = other RNA
aaaataaaaaaaaataa

SEQ ID NO: 3405 - RNA, 17 nt, synthetic construct
  source 1..17: mol_type = other RNA
aaaaataaaaaaaataa

SEQ ID NO: 3406 - RNA, 17 nt, synthetic construct
  source 1..17: mol_type = other RNA
aaaaaaaataaatatac

SEQ ID NO: 3407 - RNA, 17 nt, synthetic construct
  source 1..17: mol_type = other RNA
taaatataaataaatat

SEQ ID NO: 3408 - RNA, 17 nt, synthetic construct
  source 1..17: mol_type = other RNA
taaataaatataaatat

SEQ ID NO: 3409 - RNA, 17 nt, synthetic construct
  source 1..17: mol_type = other RNA
aaaaataaaataaataa

SEQ ID NO: 3410 - RNA, 17 nt, synthetic construct
  source 1..17: mol_type = other RNA
aaaataaataaaaataa

SEQ ID NO: 3411 - RNA, 17 nt, synthetic construct
  source 1..17: mol_type = other RNA
aaaaataaataaaataa

SEQ ID NO: 3412 - RNA, 17 nt, synthetic construct
  source 1..17: mol_type = other RNA
aaaataaaaataaataa

SEQ ID NO: 3413 - RNA, 17 nt, synthetic construct
  source 1..17: mol_type = other RNA
aaaataaataaatatac

SEQ ID NO: 3414 - RNA, 17 nt, synthetic construct
  source 1..17: mol_type = other RNA
aataaatataaatataa

SEQ ID NO: 3415 - RNA, 17 nt, synthetic construct
  source 1..17: mol_type = other RNA
aaatataaaaaaaaata

SEQ ID NO: 3416 - RNA, 17 nt, synthetic construct
  source 1..17: mol_type = other RNA
aatataaatataaataa

SEQ ID NO: 3417 - RNA, 17 nt, synthetic construct
  source 1..17: mol_type = other RNA
aatataaataaatataa

SEQ ID NO: 3418 - RNA, 17 nt, synthetic construct
  source 1..17: mol_type = other RNA
aaaaataaaaaaataaa

SEQ ID NO: 3419 - RNA, 17 nt, synthetic construct
  source 1..17: mol_type = other RNA
aaaaaataaaaaataaa

SEQ ID NO: 3420 - RNA, 17 nt, synthetic construct
  source 1..17: mol_type = other RNA
aaaataaaaaaaataaa

SEQ ID NO: 3421 - RNA, 17 nt, synthetic construct
  source 1..17: mol_type = other RNA
aaaaaaataaaaataaa

SEQ ID NO: 3422 - RNA, 17 nt, synthetic construct
  source 1..17: mol_type = other RNA
aaaaaaaataaaataaa

SEQ ID NO: 3423 - RNA, 17 nt, synthetic construct
  source 1..17: mol_type = other RNA
aaataaatataaaaata

SEQ ID NO: 3424 - RNA, 17 nt, synthetic construct
  source 1..17: mol_type = other RNA
aaatataaaaataaata

SEQ ID NO: 3425 - RNA, 17 nt, synthetic construct
  source 1..17: mol_type = other RNA
aaatataaataaaaata

SEQ ID NO: 3426 - RNA, 17 nt, synthetic construct
  source 1..17: mol_type = other RNA
aaataaaaatataaata

SEQ ID NO: 3427 - RNA, 17 nt, synthetic construct
  source 1..17: mol_type = other RNA
aaaataaaataaataaa

SEQ ID NO: 3428 - RNA, 17 nt, synthetic construct
  source 1..17: mol_type = other RNA
aaaataaataaaataaa

SEQ ID NO: 3429 - RNA, 18 nt, synthetic construct
  source 1..18: mol_type = other RNA
aaataaataaataaataa

SEQ ID NO: 3430 - RNA, 18 nt, synthetic construct
  source 1..18: mol_type = other RNA
aaaaaaaaaaaaaatata

SEQ ID NO: 3431 - RNA, 18 nt, synthetic construct
  source 1..18: mol_type = other RNA
aaataaataaataaatat

SEQ ID NO: 3432 - RNA, 18 nt, synthetic construct
  source 1..18: mol_type = other RNA
aaaaaaaaaataaatata

SEQ ID NO: 3433 - RNA, 18 nt, synthetic construct
  source 1..18: mol_type = other RNA
aaaaaataaataaatata

SEQ ID NO: 3434 - RNA, 18 nt, synthetic construct
  source 1..18: mol_type = other RNA
aataaataaataaatata

SEQ ID NO: 3435 - RNA, 18 nt, synthetic construct
  source 1..18: mol_type = other RNA
aaaaaaaatataaatata

SEQ ID NO: 3436 - RNA, 18 nt, synthetic construct
  source 1..18: mol_type = other RNA
aaaataaatataaatata

SEQ ID NO: 3437 - RNA, 18 nt, synthetic construct
  source 1..18: mol_type = other RNA
aaaatataaataaatata

SEQ ID NO: 3438 - RNA, 18 nt, synthetic construct
  source 1..18: mol_type = other RNA
aaataaaaaaaaaatata

SEQ ID NO: 3439 - RNA, 18 nt, synthetic construct
  source 1..18: mol_type = other RNA
aaataaataaaaaatata

SEQ ID NO: 3440 - RNA, 18 nt, synthetic construct
  source 1..18: mol_type = other RNA
aaataaaaaataaatata

SEQ ID NO: 3441 - RNA, 18 nt, synthetic construct
  source 1..18: mol_type = other RNA
aaaaaaaaaaaatatata

SEQ ID NO: 3442 - RNA, 18 nt, synthetic construct
  source 1..18: mol_type = other RNA
aaaaaaaataaatatata

SEQ ID NO: 3443 - RNA, 18 nt, synthetic construct
  source 1..18: mol_type = other RNA
aaaaaaaaaaaaaaataa

SEQ ID NO: 3444 - RNA, 18 nt, synthetic construct
  source 1..18: mol_type = other RNA
aaaataaataaatatata

SEQ ID NO: 3445 - RNA, 18 nt, synthetic construct
  source 1..18: mol_type = other RNA
aaaaaaaaaaataaataa

SEQ ID NO: 3446 - RNA, 18 nt, synthetic construct
  source 1..18: mol_type = other RNA
aaaaaaataaataaataa

SEQ ID NO: 3447 - RNA, 18 nt, synthetic construct
  source 1..18: mol_type = other RNA
aaaaaaaaaaaaaataaa

SEQ ID NO: 3448 - RNA, 18 nt, synthetic construct
  source 1..18: mol_type = other RNA
aaaaaaaaaataaataaa

SEQ ID NO: 3449 - RNA, 18 nt, synthetic construct
  source 1..18: mol_type = other RNA
aaaaaataaataaataaa

SEQ ID NO: 3450 - RNA, 18 nt, synthetic construct
  source 1..18: mol_type = other RNA
aaaaaaaaaaaaaaatat

SEQ ID NO: 3451 - RNA, 18 nt, synthetic construct
  source 1..18: mol_type = other RNA
aaaaaaaaaaataaatat

SEQ ID NO: 3452 - RNA, 18 nt, synthetic construct
  source 1..18: mol_type = other RNA
aaaaaaataaataaatat

SEQ ID NO: 3453 - RNA, 18 nt, synthetic construct
  source 1..18: mol_type = other RNA
aaatataaatataaataa

SEQ ID NO: 3454 - RNA, 18 nt, synthetic construct
  source 1..18: mol_type = other RNA
aaataaatataaatataa

SEQ ID NO: 3455 - RNA, 18 nt, synthetic construct
  source 1..18: mol_type = other RNA
aaatataaataaatataa

SEQ ID NO: 3456 - RNA, 18 nt, synthetic construct
  source 1..18: mol_type = other RNA
aaataaataaataatata

SEQ ID NO: 3457 - RNA, 18 nt, synthetic construct
  source 1..18: mol_type = other RNA
aaataataaataaatata

SEQ ID NO: 3458 - RNA, 18 nt, synthetic construct
  source 1..18: mol_type = other RNA
aaataaataataaatata

SEQ ID NO: 3459 - RNA, 18 nt, synthetic construct
  source 1..18: mol_type = other RNA
aaataaatatataaataa

SEQ ID NO: 3460 - RNA, 18 nt, synthetic construct
  source 1..18: mol_type = other RNA
aaatatataaataaataa

SEQ ID NO: 3461 - RNA, 18 nt, synthetic construct
  source 1..18: mol_type = other RNA
aaataaataaatatataa

SEQ ID NO: 3462 - RNA, 18 nt, synthetic construct
  source 1..18: mol_type = other RNA
aaatataaatataaatat

SEQ ID NO: 3463 - RNA, 18 nt, synthetic construct
  source 1..18: mol_type = other RNA
aaaaaaaaaaaaaaaata

SEQ ID NO: 3464 - RNA, 18 nt, synthetic construct
  source 1..18: mol_type = other RNA
aaaaaaaaaaaataaata

SEQ ID NO: 3465 - RNA, 18 nt, synthetic construct
  source 1..18: mol_type = other RNA
aaaaaaaataaataaata

SEQ ID NO: 3466 - RNA, 18 nt, synthetic construct
  source 1..18: mol_type = other RNA
aaaataaataaataaata

SEQ ID NO: 3467 - RNA, 18 nt, synthetic construct
  source 1..18: mol_type = other RNA
aaatataaaaaaaatata

SEQ ID NO: 3468 - RNA, 18 nt, synthetic construct
  source 1..18: mol_type = other RNA
aaataaatataaaatata

SEQ ID NO: 3469 - RNA, 18 nt, synthetic construct
  source 1..18: mol_type = other RNA
aaatataaataaaatata

SEQ ID NO: 3470 - RNA, 18 nt, synthetic construct
  source 1..18: mol_type = other RNA
aaataaaatataaatata

SEQ ID NO: 3471 - RNA, 18 nt, synthetic construct
  source 1..18: mol_type = other RNA
aaatataaaataaatata

SEQ ID NO: 3472 - RNA, 18 nt, synthetic construct
  source 1..18: mol_type = other RNA
aaataaatatataaatat

SEQ ID NO: 3473 - RNA, 18 nt, synthetic construct
  source 1..18: mol_type = other RNA
aaatatataaataaatat

SEQ ID NO: 3474 - RNA, 18 nt, synthetic construct
  source 1..18: mol_type = other RNA
aaataaatataaatatat

SEQ ID NO: 3475 - RNA, 18 nt, synthetic construct
  source 1..18: mol_type = other RNA
aaatataaataaatatat

SEQ ID NO: 3476 - RNA, 18 nt, synthetic construct
  source 1..18: mol_type = other RNA
aaaaaatatataaatata

SEQ ID NO: 3477 - RNA, 18 nt, synthetic construct
  source 1..18: mol_type = other RNA
aaaaaatataaatatata

SEQ ID NO: 3478 - RNA, 18 nt, synthetic construct
  source 1..18: mol_type = other RNA
aataaataaataaataaa

SEQ ID NO: 3479 - RNA, 18 nt, synthetic construct
  source 1..18: mol_type = other RNA
aaaaaaaaaaaaatataa

SEQ ID NO: 3480 - RNA, 18 nt, synthetic construct
  source 1..18: mol_type = other RNA
aaaaaaaaatataaataa

SEQ ID NO: 3481 - RNA, 18 nt, synthetic construct
  source 1..18: mol_type = other RNA
aaaaaaaaataaatataa

SEQ ID NO: 3482 - RNA, 18 nt, synthetic construct
  source 1..18: mol_type = other RNA
aaaaataaatataaataa

SEQ ID NO: 3483 - RNA, 18 nt, synthetic construct
  source 1..18: mol_type = other RNA
aaaaataaataaatataa

SEQ ID NO: 3484 - RNA, 18 nt, synthetic construct
  source 1..18: mol_type = other RNA
aaaaatataaataaataa

SEQ ID NO: 3485 - RNA, 18 nt, synthetic construct
  source 1..18: mol_type = other RNA
aaaaaaaaaaaatataaa

SEQ ID NO: 3486 - RNA, 18 nt, synthetic construct
  source 1..18: mol_type = other RNA
aaaaaaaatataaataaa

SEQ ID NO: 3487 - RNA, 18 nt, synthetic construct
  source 1..18: mol_type = other RNA
aaaaaaaataaatataaa

SEQ ID NO: 3488 - RNA, 18 nt, synthetic construct
  source 1..18: mol_type = other RNA
aaataaaaaaaatatata

SEQ ID NO: 3489 - RNA, 18 nt, synthetic construct
  source 1..18: mol_type = other RNA
aaaataaataaatataaa

SEQ ID NO: 3490 - RNA, 18 nt, synthetic construct
  source 1..18: mol_type = other RNA
aaaatataaataaataaa

SEQ ID NO: 3491 - RNA, 18 nt, synthetic construct
  source 1..18: mol_type = other RNA
aaaataaatataaataaa

SEQ ID NO: 3492 - RNA, 18 nt, synthetic construct
  source 1..18: mol_type = other RNA
aaataaaataaatatata

SEQ ID NO: 3493 - RNA, 18 nt, synthetic construct
  source 1..18: mol_type = other RNA
aaataaataaaatatata

SEQ ID NO: 3494 - RNA, 18 nt, synthetic construct
  source 1..18: mol_type = other RNA
aaataaaaaaaaaaataa

SEQ ID NO: 3495 - RNA, 18 nt, synthetic construct
  source 1..18: mol_type = other RNA
aaataaataaatatatat

SEQ ID NO: 3496 - RNA, 18 nt, synthetic construct
  source 1..18: mol_type = other RNA
aaataaataaaaaaataa

SEQ ID NO: 3497 - RNA, 18 nt, synthetic construct
  source 1..18: mol_type = other RNA
aaataaaaaaataaataa

SEQ ID NO: 3498 - RNA, 18 nt, synthetic construct
  source 1..18: mol_type = other RNA
aaaaaaaaaatatatata

SEQ ID NO: 3499 - RNA, 18 nt, synthetic construct
  source 1..18: mol_type = other RNA
aaaaaataaatatatata

SEQ ID NO: 3500 - RNA, 18 nt, synthetic construct
  source 1..18: mol_type = other RNA
aaataaaaaaaaaataaa

SEQ ID NO: 3501 - RNA, 18 nt, synthetic construct
  source 1..18: mol_type = other RNA
taaatataaataaatata

SEQ ID NO: 3502 - RNA, 18 nt, synthetic construct
  source 1..18: mol_type = other RNA
taaataaatataaatata

SEQ ID NO: 3503 - RNA, 18 nt, synthetic construct
  source 1..18: mol_type = other RNA
aaataaataaaaaataaa

SEQ ID NO: 3504 - RNA, 18 nt, synthetic construct
  source 1..18: mol_type = other RNA
aaataaaaaataaataaa

SEQ ID NO: 3505 - RNA, 18 nt, synthetic construct
  source 1..18: mol_type = other RNA
aaaaaaaaatataaatat

SEQ ID NO: 3506 - RNA, 18 nt, synthetic construct
  source 1..18: mol_type = other RNA
aaaaataaatataaatat

SEQ ID NO: 3507 - RNA, 18 nt, synthetic construct
  source 1..18: mol_type = other RNA
aaaaatataaataaatat

SEQ ID NO: 3508 - RNA, 18 nt, synthetic construct
  source 1..18: mol_type = other RNA
aaaaaaaaaaaaaataat

SEQ ID NO: 3509 - RNA, 18 nt, synthetic construct
  source 1..18: mol_type = other RNA
aaataaaaaaaaaaatat

SEQ ID NO: 3510 - RNA, 18 nt, synthetic construct
  source 1..18: mol_type = other RNA
aaaaaaaaaataaataat

SEQ ID NO: 3511 - RNA, 18 nt, synthetic construct
  source 1..18: mol_type = other RNA
aaataaaaaaataaatat

SEQ ID NO: 3512 - RNA, 18 nt, synthetic construct
  source 1..18: mol_type = other RNA
aaataaataaaaaaatat

SEQ ID NO: 3513 - RNA, 18 nt, synthetic construct
  source 1..18: mol_type = other RNA
aaaaaataaataaataat

SEQ ID NO: 3514 - RNA, 18 nt, synthetic construct
  source 1..18: mol_type = other RNA
taaataaataaatatata

SEQ ID NO: 3515 - RNA, 18 nt, synthetic construct
  source 1..18: mol_type = other RNA
aaaaaaataaaaaatata

SEQ ID NO: 3516 - RNA, 18 nt, synthetic construct
  source 1..18: mol_type = other RNA
aaaaaaaaataaaatata

SEQ ID NO: 3517 - RNA, 18 nt, synthetic construct
  source 1..18: mol_type = other RNA
aaaaataaaaaaaatata

SEQ ID NO: 3518 - RNA, 18 nt, synthetic construct
  source 1..18: mol_type = other RNA
aaaaaataaaaaaatata

SEQ ID NO: 3519 - RNA, 18 nt, synthetic construct
  source 1..18: mol_type = other RNA
aaaataaaaaaaaatata

SEQ ID NO: 3520 - RNA, 18 nt, synthetic construct
  source 1..18: mol_type = other RNA
aaaaaaaataaaaatata

SEQ ID NO: 3521 - RNA, 18 nt, synthetic construct
  source 1..18: mol_type = other RNA
aaaaaaaaaaaaatatat

SEQ ID NO: 3522 - RNA, 18 nt, synthetic construct
  source 1..18: mol_type = other RNA
aaaaataaataaaatata

SEQ ID NO: 3523 - RNA, 18 nt, synthetic construct
  source 1..18: mol_type = other RNA
aaaataaataaaaatata

SEQ ID NO: 3524 - RNA, 18 nt, synthetic construct
  source 1..18: mol_type = other RNA
aaaaataaaataaatata

SEQ ID NO: 3525 - RNA, 18 nt, synthetic construct
  source 1..18: mol_type = other RNA
aaaataaaaataaatata

SEQ ID NO: 3526 - RNA, 18 nt, synthetic construct
  source 1..18: mol_type = other RNA
aaaaaaaaaaaaaaaaaa

SEQ ID NO: 3527 - RNA, 18 nt, synthetic construct
  source 1..18: mol_type = other RNA
aaaaaaaaataaatatat

SEQ ID NO: 3528 - RNA, 18 nt, synthetic construct
  source 1..18: mol_type = other RNA
aaaaataaataaatatat

SEQ ID NO: 3529 - RNA, 18 nt, synthetic construct
  source 1..18: mol_type = other RNA
aatataaatataaatata

SEQ ID NO: 3530 - RNA, 18 nt, synthetic construct
  source 1..18: mol_type = other RNA
aaataaataaataaatac

SEQ ID NO: 3531 - RNA, 18 nt, synthetic construct
  source 1..18: mol_type = other RNA
aaaaaaaaaatataaata

SEQ ID NO: 3532 - RNA, 18 nt, synthetic construct
  source 1..18: mol_type = other RNA
aaaaaataaatataaata

SEQ ID NO: 3533 - RNA, 18 nt, synthetic construct
  source 1..18: mol_type = other RNA
aaaaaatataaataaata

SEQ ID NO: 3534 - RNA, 18 nt, synthetic construct
  source 1..18: mol_type = other RNA
aataaatataaatatata

SEQ ID NO: 3535 - RNA, 18 nt, synthetic construct
  source 1..18: mol_type = other RNA
aatatataaataaatata

SEQ ID NO: 3536 - RNA, 18 nt, synthetic construct
  source 1..18: mol_type = other RNA
aataaatatataaatata

SEQ ID NO: 3537 - RNA, 18 nt, synthetic construct
  source 1..18: mol_type = other RNA
aatataaataaatatata

SEQ ID NO: 3538 - RNA, 18 nt, synthetic construct
  source 1..18: mol_type = other RNA
aaataaaaaaaaaaaata

SEQ ID NO: 3539 - RNA, 18 nt, synthetic construct
  source 1..18: mol_type = other RNA
aaataaataaaaaaaata

SEQ ID NO: 3540 - RNA, 18 nt, synthetic construct
  source 1..18: mol_type = other RNA
aaataaaaaaaataaata

SEQ ID NO: 3541 - RNA, 18 nt, synthetic construct
  source 1..18: mol_type = other RNA
aaataataaataaataaa

SEQ ID NO: 3542 - RNA, 18 nt, synthetic construct
  source 1..18: mol_type = other RNA
aaataaataaataataaa

SEQ ID NO: 3543 - RNA, 18 nt, synthetic construct
  source 1..18: mol_type = other RNA
aaataaataataaataaa

SEQ ID NO: 3544 - RNA, 18 nt, synthetic construct
  source 1..18: mol_type = other RNA
aaataaataaaataaata

SEQ ID NO: 3545 - RNA, 18 nt, synthetic construct
  source 1..18: mol_type = other RNA
aaataaataaataaaata

SEQ ID NO: 3546 - RNA, 18 nt, synthetic construct
  source 1..18: mol_type = other RNA
aaataaaataaataaata

SEQ ID NO: 3547 - RNA, 18 nt, synthetic construct
  source 1..18: mol_type = other RNA
aaaaaaatataaatataa

SEQ ID NO: 3548 - RNA, 18 nt, synthetic construct
  source 1..18: mol_type = other RNA
aataaataaatatatata

SEQ ID NO: 3549 - RNA, 18 nt, synthetic construct
  source 1..18: mol_type = other RNA
aaaaaatataaatataaa

SEQ ID NO: 3550 - RNA, 18 nt, synthetic construct
  source 1..18: mol_type = other RNA
aaatataaaaaatatata

SEQ ID NO: 3551 - RNA, 18 nt, synthetic construct
  source 1..18: mol_type = other RNA
aaatatataaaaaatata

SEQ ID NO: 3552 - RNA, 18 nt, synthetic construct
  source 1..18: mol_type = other RNA
aaaaaaaaaaataatata

SEQ ID NO: 3553 - RNA, 18 nt, synthetic construct
  source 1..18: mol_type = other RNA
aaatataaaaaaaaataa

SEQ ID NO: 3554 - RNA, 18 nt, synthetic construct
  source 1..18: mol_type = other RNA
aaataaaaaaaaatataa

SEQ ID NO: 3555 - RNA, 18 nt, synthetic construct
  source 1..18: mol_type = other RNA
aaaaaaataaataatata

SEQ ID NO: 3556 - RNA, 18 nt, synthetic construct
  source 1..18: mol_type = other RNA
aaaaaaataataaatata

SEQ ID NO: 3557 - RNA, 18 nt, synthetic construct
  source 1..18: mol_type = other RNA
aaataaatataaaaataa

SEQ ID NO: 3558 - RNA, 18 nt, synthetic construct
  source 1..18: mol_type = other RNA
aaataaaaatataaataa

SEQ ID NO: 3559 - RNA, 18 nt, synthetic construct
  source 1..18: mol_type = other RNA
aaatataaataaaaataa

SEQ ID NO: 3560 - RNA, 18 nt, synthetic construct
  source 1..18: mol_type = other RNA
aaatataaaaataaataa

SEQ ID NO: 3561 - RNA, 18 nt, synthetic construct
  source 1..18: mol_type = other RNA
aaataaaaataaatataa

SEQ ID NO: 3562 - RNA, 18 nt, synthetic construct
  source 1..18: mol_type = other RNA
aaataaataaaaatataa

SEQ ID NO: 3563 - RNA, 18 nt, synthetic construct
  source 1..18: mol_type = other RNA
aaataaatataaatatac

SEQ ID NO: 3564 - RNA, 18 nt, synthetic construct
  source 1..18: mol_type = other RNA
aaatataaataaatatac

SEQ ID NO: 3565 - RNA, 18 nt, synthetic construct
  source 1..18: mol_type = other RNA
aaaatataaatatatata

SEQ ID NO: 3566 - RNA, 18 nt, synthetic construct
  source 1..18: mol_type = other RNA
aaaatatataaatatata

SEQ ID NO: 3567 - RNA, 18 nt, synthetic construct
  source 1..18: mol_type = other RNA
aaaatatatataaatata

SEQ ID NO: 3568 - RNA, 18 nt, synthetic construct
  source 1..18: mol_type = other RNA
aaatataaaaaaaataaa

SEQ ID NO: 3569 - RNA, 18 nt, synthetic construct
  source 1..18: mol_type = other RNA
aaataaaaaaaatataaa

SEQ ID NO: 3570 - RNA, 18 nt, synthetic construct
  source 1..18: mol_type = other RNA
aaaaaaaaaaatatataa

SEQ ID NO: 3571 - RNA, 18 nt, synthetic construct
  source 1..18: mol_type = other RNA
aaataaatataaaataaa

SEQ ID NO: 3572 - RNA, 18 nt, synthetic construct
  source 1..18: mol_type = other RNA
aaatataaataaaataaa

SEQ ID NO: 3573 - RNA, 18 nt, synthetic construct
  source 1..18: mol_type = other RNA
aaataaataaaatataaa

SEQ ID NO: 3574 - RNA, 18 nt, synthetic construct
  source 1..18: mol_type = other RNA
aaataaaataaatataaa

SEQ ID NO: 3575 - RNA, 18 nt, synthetic construct
  source 1..18: mol_type = other RNA
aaataaaatataaataaa

SEQ ID NO: 3576 - RNA, 18 nt, synthetic construct
  source 1..18: mol_type = other RNA
aaatataaaataaataaa

SEQ ID NO: 3577 - RNA, 18 nt, synthetic construct
  source 1..18: mol_type = other RNA
aaaaaaatatataaataa

SEQ ID NO: 3578 - RNA, 18 nt, synthetic construct
  source 1..18: mol_type = other RNA
aaaaaaataaatatataa

SEQ ID NO: 3579 - RNA, 18 nt, synthetic construct
  source 1..18: mol_type = other RNA
taaataaataaataaata

SEQ ID NO: 3580 - RNA, 18 nt, synthetic construct
  source 1..18: mol_type = other RNA
aataaataaataaataat

SEQ ID NO: 3581 - RNA, 18 nt, synthetic construct
  source 1..18: mol_type = other RNA
aataaaaaaaaaaatata

SEQ ID NO: 3582 - RNA, 18 nt, synthetic construct
  source 1..18: mol_type = other RNA
aaaaaaaaaatatataaa

SEQ ID NO: 3583 - RNA, 18 nt, synthetic construct
  source 1..18: mol_type = other RNA
aataaataaaaaaatata

SEQ ID NO: 3584 - RNA, 18 nt, synthetic construct
  source 1..18: mol_type = other RNA
atataaataaataaataa

SEQ ID NO: 3585 - RNA, 18 nt, synthetic construct
  source 1..18: mol_type = other RNA
aaaaaataaatatataaa

SEQ ID NO: 3586 - RNA, 18 nt, synthetic construct
  source 1..18: mol_type = other RNA
aaaaaatatataaataaa

SEQ ID NO: 3587 - RNA, 18 nt, synthetic construct
  source 1..18: mol_type = other RNA
aataaaaaaataaatata

SEQ ID NO: 3588 - RNA, 18 nt, synthetic construct
  source 1..18: mol_type = other RNA
aaataaaaaatatatata

SEQ ID NO: 3589 - RNA, 18 nt, synthetic construct
  source 1..18: mol_type = other RNA
aaaaaaaaaaaatataat

SEQ ID NO: 3590 - RNA, 18 nt, synthetic construct
  source 1..18: mol_type = other RNA
aaatataaaaaaaaatat

SEQ ID NO: 3591 - RNA, 18 nt, synthetic construct
  source 1..18: mol_type = other RNA
aaaaaaaatataaataat

SEQ ID NO: 3592 - RNA, 18 nt, synthetic construct
  source 1..18: mol_type = other RNA
aaaaaaaataaatataat

SEQ ID NO: 3593 - RNA, 18 nt, synthetic construct
  source 1..18: mol_type = other RNA
aaataaataaatatatac

SEQ ID NO: 3594 - RNA, 18 nt, synthetic construct
  source 1..18: mol_type = other RNA
aaataaatataaaaatat

SEQ ID NO: 3595 - RNA, 18 nt, synthetic construct
  source 1..18: mol_type = other RNA
aaataaaaatataaatat

SEQ ID NO: 3596 - RNA, 18 nt, synthetic construct
  source 1..18: mol_type = other RNA
aaatataaaaataaatat

SEQ ID NO: 3597 - RNA, 18 nt, synthetic construct
  source 1..18: mol_type = other RNA
aaatataaataaaaatat

SEQ ID NO: 3598 - RNA, 18 nt, synthetic construct
  source 1..18: mol_type = other RNA
aaaaaaaatatatatata

SEQ ID NO: 3599 - RNA, 18 nt, synthetic construct
  source 1..18: mol_type = other RNA
aaaataaataaatataat

SEQ ID NO: 3600 - RNA, 18 nt, synthetic construct
  source 1..18: mol_type = other RNA
aaaatataaataaataat

SEQ ID NO: 3601 - RNA, 18 nt, synthetic construct
  source 1..18: mol_type = other RNA
aaaataaatataaataat

SEQ ID NO: 3602 - RNA, 18 nt, synthetic construct
  source 1..18: mol_type = other RNA
aaaataaatatatatata

SEQ ID NO: 3603 - RNA, 18 nt, synthetic construct
  source 1..18: mol_type = other RNA
aaaaaaatataaaatata

SEQ ID NO: 3604 - RNA, 18 nt, synthetic construct
  source 1..18: mol_type = other RNA
aaaaatataaaaaatata

SEQ ID NO: 3605 - RNA, 18 nt, synthetic construct
  source 1..18: mol_type = other RNA
aaaatataaaaaaatata

SEQ ID NO: 3606 - RNA, 18 nt, synthetic construct
  source 1..18: mol_type = other RNA
aaaaaatataaaaatata

SEQ ID NO: 3607 - RNA, 18 nt, synthetic construct
  source 1..18: mol_type = other RNA
aaatataaatataatata

SEQ ID NO: 3608 - RNA, 18 nt, synthetic construct
  source 1..18: mol_type = other RNA
aaatataatataaatata

SEQ ID NO: 3609 - RNA, 18 nt, synthetic construct
  source 1..18: mol_type = other RNA
aaaaaaatatataaatat

SEQ ID NO: 3610 - RNA, 18 nt, synthetic construct
  source 1..18: mol_type = other RNA
aaaaaaatataaatatat

SEQ ID NO: 3611 - RNA, 18 nt, synthetic construct
  source 1..18: mol_type = other RNA
aaataaaaaaaaaataat

SEQ ID NO: 3612 - RNA, 18 nt, synthetic construct
  source 1..18: mol_type = other RNA
aaataaataaaaaataat

SEQ ID NO: 3613 - RNA, 18 nt, synthetic construct
  source 1..18: mol_type = other RNA
aaataaaaaataaataat

SEQ ID NO: 3614 - RNA, 18 nt, synthetic construct
  source 1..18: mol_type = other RNA
aaaaaaaaaaaaaatatt

SEQ ID NO: 3615 - RNA, 18 nt, synthetic construct
  source 1..18: mol_type = other RNA
atataaataaataaatat

SEQ ID NO: 3616 - RNA, 18 nt, synthetic construct
  source 1..18: mol_type = other RNA
aaatataaataaataaat

SEQ ID NO: 3617 - RNA, 18 nt, synthetic construct
  source 1..18: mol_type = other RNA
ataaatataaataaataa

SEQ ID NO: 3618 - RNA, 18 nt, synthetic construct
  source 1..18: mol_type = other RNA
aaataaatataaataaat

SEQ ID NO: 3619 - RNA, 18 nt, synthetic construct
  source 1..18: mol_type = other RNA
aaataaataaatataaat

SEQ ID NO: 3620 - RNA, 18 nt, synthetic construct
  source 1..18: mol_type = other RNA
taaataaataaatataaa

SEQ ID NO: 3621 - RNA, 18 nt, synthetic construct
  source 1..18: mol_type = other RNA
taaatataaataaataaa

SEQ ID NO: 3622 - RNA, 18 nt, synthetic construct
  source 1..18: mol_type = other RNA
ataaataaataaatataa

SEQ ID NO: 3623 - RNA, 18 nt, synthetic construct
  source 1..18: mol_type = other RNA
aataaatataaataaata

SEQ ID NO: 3624 - RNA, 18 nt, synthetic construct
  source 1..18: mol_type = other RNA
taaataaatataaataaa

SEQ ID NO: 3625 - RNA, 18 nt, synthetic construct
  source 1..18: mol_type = other RNA
aataaataaatataaata

SEQ ID NO: 3626 - RNA, 18 nt, synthetic construct
  source 1..18: mol_type = other RNA
tataaataaataaatata

SEQ ID NO: 3627 - RNA, 18 nt, synthetic construct
  source 1..18: mol_type = other RNA
aatataaataaataaata

SEQ ID NO: 3628 - RNA, 18 nt, synthetic construct
  source 1..18: mol_type = other RNA
ataaataaatataaataa

SEQ ID NO: 3629 - RNA, 19 nt, synthetic construct
  source 1..19: mol_type = other RNA
aaataaataaataaatata

SEQ ID NO: 3630 - RNA, 19 nt, synthetic construct
  source 1..19: mol_type = other RNA
aaataaataaataaataaa

SEQ ID NO: 3631 - RNA, 19 nt, synthetic construct
  source 1..19: mol_type = other RNA
aaaaaaaaaaaaaaatata

SEQ ID NO: 3632 - RNA, 19 nt, synthetic construct
  source 1..19: mol_type = other RNA
aaaaaaaaaaataaatata

SEQ ID NO: 3633 - RNA, 19 nt, synthetic construct
  source 1..19: mol_type = other RNA
aaaaaaataaataaatata

SEQ ID NO: 3634 - RNA, 19 nt, synthetic construct
  source 1..19: mol_type = other RNA
aaatataaatataaatata

SEQ ID NO: 3635 - RNA, 19 nt, synthetic construct
  source 1..19: mol_type = other RNA
aaataaatatataaatata

SEQ ID NO: 3636 - RNA, 19 nt, synthetic construct
  source 1..19: mol_type = other RNA
aaataaatataaatatata

SEQ ID NO: 3637 - RNA, 19 nt, synthetic construct
  source 1..19: mol_type = other RNA
aaatataaataaatatata

SEQ ID NO: 3638 - RNA, 19 nt, synthetic construct
  source 1..19: mol_type = other RNA
aaatatataaataaatata

SEQ ID NO: 3639 - RNA, 19 nt, synthetic construct
  source 1..19: mol_type = other RNA
aaataaataaatatatata

SEQ ID NO: 3640 - RNA, 19 nt, synthetic construct
  source 1..19: mol_type = other RNA
aaaaaaaaatataaatata

SEQ ID NO: 3641 - RNA, 19 nt, synthetic construct
  source 1..19: mol_type = other RNA
aaaaataaatataaatata

SEQ ID NO: 3642 - RNA, 19 nt, synthetic construct
  source 1..19: mol_type = other RNA
aaaaatataaataaatata

SEQ ID NO: 3643 - RNA, 19 nt, synthetic construct
  source 1..19: mol_type = other RNA
aaataaataaataaataat

SEQ ID NO: 3644 - RNA, 19 nt, synthetic construct
  source 1..19: mol_type = other RNA
aaataaaaaaaaaaatata

SEQ ID NO: 3645 - RNA, 19 nt, synthetic construct
  source 1..19: mol_type = other RNA
aaataaataaaaaaatata

SEQ ID NO: 3646 - RNA, 19 nt, synthetic construct
  source 1..19: mol_type = other RNA
aaataaaaaaataaatata

SEQ ID NO: 3647 - RNA, 19 nt, synthetic construct
  source 1..19: mol_type = other RNA
aaaaaaaaaaaaatatata

SEQ ID NO: 3648 - RNA, 19 nt, synthetic construct
  source 1..19: mol_type = other RNA
aaaaaaaaataaatatata

SEQ ID NO: 3649 - RNA, 19 nt, synthetic construct
  source 1..19: mol_type = other RNA
aaaaaaaaaaaaaaaataa

SEQ ID NO: 3650 - RNA, 19 nt, synthetic construct
  source 1..19: mol_type = other RNA
aaaaataaataaatatata

SEQ ID NO: 3651 - RNA, 19 nt, synthetic construct
  source 1..19: mol_type = other RNA
aaaaaaaaaaaataaataa

SEQ ID NO: 3652 - RNA, 19 nt, synthetic construct
  source 1..19: mol_type = other RNA
aaaaaaaataaataaataa

SEQ ID NO: 3653 - RNA, 19 nt, synthetic construct
  source 1..19: mol_type = other RNA
aaaaaaaaaaaaaaataaa

SEQ ID NO: 3654 - RNA, 19 nt, synthetic construct
  source 1..19: mol_type = other RNA
aaaataaataaataaataa

SEQ ID NO: 3655 - RNA, 19 nt, synthetic construct
  source 1..19: mol_type = other RNA
aaaaaaaaaaataaataaa

SEQ ID NO: 3656 - RNA, 19 nt, synthetic construct
  source 1..19: mol_type = other RNA
aaaaaaataaataaataaa

SEQ ID NO: 3657 - RNA, 19 nt, synthetic construct
  source 1..19: mol_type = other RNA
aaataaataaatataaata

SEQ ID NO: 3658 - RNA, 19 nt, synthetic construct
  source 1..19: mol_type = other RNA
aaatataaataaataaata

SEQ ID NO: 3659 - RNA, 19 nt, synthetic construct
  source 1..19: mol_type = other RNA
aaataaatataaataaata

SEQ ID NO: 3660 - RNA, 19 nt, synthetic construct
  source 1..19: mol_type = other RNA
aaaaaaaaaaaaaaaatat

SEQ ID NO: 3661 - RNA, 19 nt, synthetic construct
  source 1..19: mol_type = other RNA
aaaaaaaaaaaataaatat

SEQ ID NO: 3662 - RNA, 19 nt, synthetic construct
  source 1..19: mol_type = other RNA
aaaaaaaataaataaatat

SEQ ID NO: 3663 - RNA, 19 nt, synthetic construct
  source 1..19: mol_type = other RNA
aaaataaataaataaatat

SEQ ID NO: 3664 - RNA, 19 nt, synthetic construct
  source 1..19: mol_type = other RNA
aaataaatataaatataaa

SEQ ID NO: 3665 - RNA, 19 nt, synthetic construct
  source 1..19: mol_type = other RNA
aaatataaataaatataaa

SEQ ID NO: 3666 - RNA, 19 nt, synthetic construct
  source 1..19: mol_type = other RNA
aaatataaatataaataaa

SEQ ID NO: 3667 - RNA, 19 nt, synthetic construct
  source 1..19: mol_type = other RNA
aaaaaaaaaaaaaaaaata

SEQ ID NO: 3668 - RNA, 19 nt, synthetic construct
  source 1..19: mol_type = other RNA
aaataaataaatatataaa

SEQ ID NO: 3669 - RNA, 19 nt, synthetic construct
  source 1..19: mol_type = other RNA
aaatatataaataaataaa

SEQ ID NO: 3670 - RNA, 19 nt, synthetic construct
  source 1..19: mol_type = other RNA
aaataaatatataaataaa

SEQ ID NO: 3671 - RNA, 19 nt, synthetic construct
  source 1..19: mol_type = other RNA
aaaaaaaaaaaaataaata

SEQ ID NO: 3672 - RNA, 19 nt, synthetic construct
  source 1..19: mol_type = other RNA
aaaaaaaaataaataaata

SEQ ID NO: 3673 - RNA, 19 nt, synthetic construct
  source 1..19: mol_type = other RNA
aaaaataaataaataaata

SEQ ID NO: 3674 - RNA, 19 nt, synthetic construct
  source 1..19: mol_type = other RNA
aaatataaaaaaaaatata

SEQ ID NO: 3675 - RNA, 19 nt, synthetic construct
  source 1..19: mol_type = other RNA
aaataaaaatataaatata

SEQ ID NO: 3676 - RNA, 19 nt, synthetic construct
  source 1..19: mol_type = other RNA
aaataaatataaaaatata

SEQ ID NO: 3677 - RNA, 19 nt, synthetic construct
  source 1..19: mol_type = other RNA
aaatataaataaaaatata

SEQ ID NO: 3678 - RNA, 19 nt, synthetic construct
  source 1..19: mol_type = other RNA
aaatataaaaataaatata

SEQ ID NO: 3679 - RNA, 19 nt, synthetic construct
  source 1..19: mol_type = other RNA
aaaaaaatatataaatata

SEQ ID NO: 3680 - RNA, 19 nt, synthetic construct
  source 1..19: mol_type = other RNA
aaaaaaatataaatatata

SEQ ID NO: 3681 - RNA, 19 nt, synthetic construct
  source 1..19: mol_type = other RNA
aaaaaaaaaaaaaatataa

SEQ ID NO: 3682 - RNA, 19 nt, synthetic construct
  source 1..19: mol_type = other RNA
aaaaaaaaaataaatataa

SEQ ID NO: 3683 - RNA, 19 nt, synthetic construct
  source 1..19: mol_type = other RNA
aaaaaaaaaatataaataa

SEQ ID NO: 3684 - RNA, 19 nt, synthetic construct
  source 1..19: mol_type = other RNA
aaataaataaataaatatt

SEQ ID NO: 3685 - RNA, 19 nt, synthetic construct
  source 1..19: mol_type = other RNA
aaaaaataaataaatataa

SEQ ID NO: 3686 - RNA, 19 nt, synthetic construct
  source 1..19: mol_type = other RNA
aaaaaataaatataaataa

SEQ ID NO: 3687 - RNA, 19 nt, synthetic construct
  source 1..19: mol_type = other RNA
aaaaaatataaataaataa

SEQ ID NO: 3688 - RNA, 19 nt, synthetic construct
  source 1..19: mol_type = other RNA
atataaataaataaatata

SEQ ID NO: 3689 - RNA, 19 nt, synthetic construct
  source 1..19: mol_type = other RNA
aaaaaaaaaaaaatataaa

SEQ ID NO: 3690 - RNA, 19 nt, synthetic construct
  source 1..19: mol_type = other RNA
aaaaaaaaataaatataaa

SEQ ID NO: 3691 - RNA, 19 nt, synthetic construct
  source 1..19: mol_type = other RNA
aaaaaaaaatataaataaa

SEQ ID NO: 3692 - RNA, 19 nt, synthetic construct
  source 1..19: mol_type = other RNA
aaataaaaaaaaatatata

SEQ ID NO: 3693 - RNA, 19 nt, synthetic construct
  source 1..19: mol_type = other RNA
aaataaataaaaatatata

SEQ ID NO: 3694 - RNA, 19 nt, synthetic construct
  source 1..19: mol_type = other RNA
aaataaaaataaatatata

SEQ ID NO: 3695 - RNA, 19 nt, synthetic construct
  source 1..19: mol_type = other RNA
aaaaatataaataaataaa

SEQ ID NO: 3696 - RNA, 19 nt, synthetic construct
  source 1..19: mol_type = other RNA
aaaaataaatataaataaa

SEQ ID NO: 3697 - RNA, 19 nt, synthetic construct
  source 1..19: mol_type = other RNA
aaaaataaataaatataaa

SEQ ID NO: 3698 - RNA, 19 nt, synthetic construct
  source 1..19: mol_type = other RNA
aaataaaaaaaaaaaataa

SEQ ID NO: 3699 - RNA, 19 nt, synthetic construct
  source 1..19: mol_type = other RNA
aaataaataaaaaaaataa

SEQ ID NO: 3700 - RNA, 19 nt, synthetic construct
  source 1..19: mol_type = other RNA
aaataaaaaaaataaataa

SEQ ID NO: 3701 - RNA, 19 nt, synthetic construct
  source 1..19: mol_type = other RNA
aaaaaaaaaaatatatata

SEQ ID NO: 3702 - RNA, 19 nt, synthetic construct
  source 1..19: mol_type = other RNA
aaataaataaaataaataa

SEQ ID NO: 3703 - RNA, 19 nt, synthetic construct
  source 1..19: mol_type = other RNA
aaataaaataaataaataa

SEQ ID NO: 3704 - RNA, 19 nt, synthetic construct
  source 1..19: mol_type = other RNA
aaataaataaataaaataa

SEQ ID NO: 3705 - RNA, 19 nt, synthetic construct
  source 1..19: mol_type = other RNA
aaaaaaataaatatatata

SEQ ID NO: 3706 - RNA, 19 nt, synthetic construct
  source 1..19: mol_type = other RNA
aaataaaaaaaaaaataaa

SEQ ID NO: 3707 - RNA, 19 nt, synthetic construct
  source 1..19: mol_type = other RNA
aaataaataaaaaaataaa

SEQ ID NO: 3708 - RNA, 19 nt, synthetic construct
  source 1..19: mol_type = other RNA
aaataaaaaaataaataaa

SEQ ID NO: 3709 - RNA, 19 nt, synthetic construct
  source 1..19: mol_type = other RNA
aaaaaaaaaatataaatat

SEQ ID NO: 3710 - RNA, 19 nt, synthetic construct
  source 1..19: mol_type = other RNA
aaaaaatataaataaatat

SEQ ID NO: 3711 - RNA, 19 nt, synthetic construct
  source 1..19: mol_type = other RNA
aaaaaataaatataaatat

SEQ ID NO: 3712 - RNA, 19 nt, synthetic construct
  source 1..19: mol_type = other RNA
ataaataaatataaatata

SEQ ID NO: 3713 - RNA, 19 nt, synthetic construct
  source 1..19: mol_type = other RNA
ataaatataaataaatata

SEQ ID NO: 3714 - RNA, 19 nt, synthetic construct
  source 1..19: mol_type = other RNA
aaaaaaaaaaaaaaataat

SEQ ID NO: 3715 - RNA, 19 nt, synthetic construct
  source 1..19: mol_type = other RNA
aaataaaaaaaaaaaatat

SEQ ID NO: 3716 - RNA, 19 nt, synthetic construct
  source 1..19: mol_type = other RNA
aaaaaaaaaaataaataat

SEQ ID NO: 3717 - RNA, 19 nt, synthetic construct
  source 1..19: mol_type = other RNA
aaataaaaaaaataaatat

SEQ ID NO: 3718 - RNA, 19 nt, synthetic construct
  source 1..19: mol_type = other RNA
aaataaataaaaaaaatat

SEQ ID NO: 3719 - RNA, 19 nt, synthetic construct
  source 1..19: mol_type = other RNA
aaaaaaataaataaataat

SEQ ID NO: 3720 - RNA, 19 nt, synthetic construct
  source 1..19: mol_type = other RNA
aaataaataaaataaatat

SEQ ID NO: 3721 - RNA, 19 nt, synthetic construct
  source 1..19: mol_type = other RNA
aaataaataaataaaatat

SEQ ID NO: 3722 - RNA, 19 nt, synthetic construct
  source 1..19: mol_type = other RNA
aaataaaataaataaatat

SEQ ID NO: 3723 - RNA, 19 nt, synthetic construct
  source 1..19: mol_type = other RNA
aaaaaaaaataaaaatata

SEQ ID NO: 3724 - RNA, 19 nt, synthetic construct
  source 1..19: mol_type = other RNA
aaaaaaataaaaaaatata

SEQ ID NO: 3725 - RNA, 19 nt, synthetic construct
  source 1..19: mol_type = other RNA
aaaaataaaaaaaaatata

SEQ ID NO: 3726 - RNA, 19 nt, synthetic construct
  source 1..19: mol_type = other RNA
aaaaaaaataaaaaatata

SEQ ID NO: 3727 - RNA, 19 nt, synthetic construct
  source 1..19: mol_type = other RNA
aaaaaataaaaaaaatata

SEQ ID NO: 3728 - RNA, 19 nt, synthetic construct
  source 1..19: mol_type = other RNA
aaaataaaaaaaaaatata

SEQ ID NO: 3729 - RNA, 19 nt, synthetic construct
  source 1..19: mol_type = other RNA
aaaaaaaaaataaaatata

SEQ ID NO: 3730 - RNA, 19 nt, synthetic construct
  source 1..19: mol_type = other RNA
aaaaaaaaaaaaaatatat

SEQ ID NO: 3731 - RNA, 19 nt, synthetic construct
  source 1..19: mol_type = other RNA
aaaaataaaaataaatata

SEQ ID NO: 3732 - RNA, 19 nt, synthetic construct
  source 1..19: mol_type = other RNA
aaaaaataaaataaatata

SEQ ID NO: 3733 - RNA, 19 nt, synthetic construct
  source 1..19: mol_type = other RNA
aaaaataaataaaaatata

SEQ ID NO: 3734 - RNA, 19 nt, synthetic construct
  source 1..19: mol_type = other RNA
aaaaaataaataaaatata

SEQ ID NO: 3735 - RNA, 19 nt, synthetic construct
  source 1..19: mol_type = other RNA
aaaataaataaaaaatata

SEQ ID NO: 3736 - RNA, 19 nt, synthetic construct
  source 1..19: mol_type = other RNA
aaaataaaaaataaatata

SEQ ID NO: 3737 - RNA, 19 nt, synthetic construct
  source 1..19: mol_type = other RNA
aaaaaaaaaaaaaaaaaaa

SEQ ID NO: 3738 - RNA, 19 nt, synthetic construct
  source 1..19: mol_type = other RNA
aaaaaaaaaataaatatat

SEQ ID NO: 3739 - RNA, 19 nt, synthetic construct
  source 1..19: mol_type = other RNA
aaaaaataaataaatatat

SEQ ID NO: 3740 - RNA, 19 nt, synthetic construct
  source 1..19: mol_type = other RNA
taaataaataaataaataa

SEQ ID NO: 3741 - RNA, 19 nt, synthetic construct
  source 1..19: mol_type = other RNA
ataaataaataaatatata

SEQ ID NO: 3742 - RNA, 19 nt, synthetic construct
  source 1..19: mol_type = other RNA
aaaaaaaaaaatataaata

SEQ ID NO: 3743 - RNA, 19 nt, synthetic construct
  source 1..19: mol_type = other RNA
aaaaaaataaatataaata

SEQ ID NO: 3744 - RNA, 19 nt, synthetic construct
  source 1..19: mol_type = other RNA
aaaaaaatataaataaata

SEQ ID NO: 3745 - RNA, 19 nt, synthetic construct
  source 1..19: mol_type = other RNA
aaataaatataaatataat

SEQ ID NO: 3746 - RNA, 19 nt, synthetic construct
  source 1..19: mol_type = other RNA
aaatataaatataaataat

SEQ ID NO: 3747 - RNA, 19 nt, synthetic construct
  source 1..19: mol_type = other RNA
aaatataaataaatataat

SEQ ID NO: 3748 - RNA, 19 nt, synthetic construct
  source 1..19: mol_type = other RNA
aaatatatatataaatata

SEQ ID NO: 3749 - RNA, 19 nt, synthetic construct
  source 1..19: mol_type = other RNA
aaatatataaatatatata

SEQ ID NO: 3750 - RNA, 19 nt, synthetic construct
  source 1..19: mol_type = other RNA
aaatataaatatatatata

SEQ ID NO: 3751 - RNA, 19 nt, synthetic construct
  source 1..19: mol_type = other RNA
aaatatatataaatatata

SEQ ID NO: 3752 - RNA, 19 nt, synthetic construct
  source 1..19: mol_type = other RNA
taaataaataaataaatat

SEQ ID NO: 3753 - RNA, 19 nt, synthetic construct
  source 1..19: mol_type = other RNA
aaataaaaaaaaaaaaata

SEQ ID NO: 3754 - RNA, 19 nt, synthetic construct
  source 1..19: mol_type = other RNA
aaataaaaaaaaataaata

SEQ ID NO: 3755 - RNA, 19 nt, synthetic construct
  source 1..19: mol_type = other RNA
aaataaataaaaaaaaata

SEQ ID NO: 3756 - RNA, 19 nt, synthetic construct
  source 1..19: mol_type = other RNA
aataaataaatataaataa

SEQ ID NO: 3757 - RNA, 19 nt, synthetic construct
  source 1..19: mol_type = other RNA
aataaataaataaatataa

SEQ ID NO: 3758 - RNA, 19 nt, synthetic construct
  source 1..19: mol_type = other RNA
aatataaataaataaataa

SEQ ID NO: 3759 - RNA, 19 nt, synthetic construct
  source 1..19: mol_type = other RNA
aataaatataaataaataa

SEQ ID NO: 3760 - RNA, 19 nt, synthetic construct
  source 1..19: mol_type = other RNA
aaataaaaataaataaata

SEQ ID NO: 3761 - RNA, 19 nt, synthetic construct
  source 1..19: mol_type = other RNA
aaataaataaaaataaata

SEQ ID NO: 3762 - RNA, 19 nt, synthetic construct
  source 1..19: mol_type = other RNA
aaataaataaataaaaata

SEQ ID NO: 3763 - RNA, 19 nt, synthetic construct
  source 1..19: mol_type = other RNA
aaaaaaaatataaatataa

SEQ ID NO: 3764 - RNA, 19 nt, synthetic construct
  source 1..19: mol_type = other RNA
aaaataaatataaatataa

SEQ ID NO: 3765 - RNA, 19 nt, synthetic construct
  source 1..19: mol_type = other RNA
aaaatataaataaatataa

SEQ ID NO: 3766 - RNA, 19 nt, synthetic construct
  source 1..19: mol_type = other RNA
aaaatataaatataaataa

SEQ ID NO: 3767 - RNA, 19 nt, synthetic construct
  source 1..19: mol_type = other RNA
aaataaatatataaataat

SEQ ID NO: 3768 - RNA, 19 nt, synthetic construct
  source 1..19: mol_type = other RNA
aaataaataaatatataat

SEQ ID NO: 3769 - RNA, 19 nt, synthetic construct
  source 1..19: mol_type = other RNA
aaatatataaataaataat

SEQ ID NO: 3770 - RNA, 19 nt, synthetic construct
  source 1..19: mol_type = other RNA
aaataaatatatatatata

SEQ ID NO: 3771 - RNA, 19 nt, synthetic construct
  source 1..19: mol_type = other RNA
aaaaaaatataaatataaa

SEQ ID NO: 3772 - RNA, 19 nt, synthetic construct
  source 1..19: mol_type = other RNA
aaatatataaaaaaatata

SEQ ID NO: 3773 - RNA, 19 nt, synthetic construct
  source 1..19: mol_type = other RNA
aaatataaaaaaatatata

SEQ ID NO: 3774 - RNA, 19 nt, synthetic construct
  source 1..19: mol_type = other RNA
aaaaaaaaaaaataatata

SEQ ID NO: 3775 - RNA, 19 nt, synthetic construct
  source 1..19: mol_type = other RNA
aaataaaaaaaaaatataa

SEQ ID NO: 3776 - RNA, 19 nt, synthetic construct
  source 1..19: mol_type = other RNA
aaatataaaaaaaaaataa

SEQ ID NO: 3777 - RNA, 19 nt, synthetic construct
  source 1..19: mol_type = other RNA
aaaaaaaataaataatata

SEQ ID NO: 3778 - RNA, 19 nt, synthetic construct
  source 1..19: mol_type = other RNA
aaaaaaaataataaatata

SEQ ID NO: 3779 - RNA, 19 nt, synthetic construct
  source 1..19: mol_type = other RNA
aataaatataaataaatat

SEQ ID NO: 3780 - RNA, 19 nt, synthetic construct
  source 1..19: mol_type = other RNA
aataaataaatataaatat

SEQ ID NO: 3781 - RNA, 19 nt, synthetic construct
  source 1..19: mol_type = other RNA
aatataaataaataaatat

SEQ ID NO: 3782 - RNA, 19 nt, synthetic construct
  source 1..19: mol_type = other RNA
aaataaaaaataaatataa

SEQ ID NO: 3783 - RNA, 19 nt, synthetic construct
  source 1..19: mol_type = other RNA
aaatataaataaaaaataa

SEQ ID NO: 3784 - RNA, 19 nt, synthetic construct
  source 1..19: mol_type = other RNA
aaataaaaaatataaataa

SEQ ID NO: 3785 - RNA, 19 nt, synthetic construct
  source 1..19: mol_type = other RNA
aaataaataaaaaatataa

SEQ ID NO: 3786 - RNA, 19 nt, synthetic construct
  source 1..19: mol_type = other RNA
aaataaatataaaaaataa

SEQ ID NO: 3787 - RNA, 19 nt, synthetic construct
  source 1..19: mol_type = other RNA
aaatataaaaaataaataa

SEQ ID NO: 3788 - RNA, 19 nt, synthetic construct
  source 1..19: mol_type = other RNA
aaaataaataaataatata

SEQ ID NO: 3789 - RNA, 19 nt, synthetic construct
  source 1..19: mol_type = other RNA
aaaataaataataaatata

SEQ ID NO: 3790 - RNA, 19 nt, synthetic construct
  source 1..19: mol_type = other RNA
aaaataataaataaatata

SEQ ID NO: 3791 - RNA, 19 nt, synthetic construct
  source 1..19: mol_type = other RNA
aaaaatatatataaatata

SEQ ID NO: 3792 - RNA, 19 nt, synthetic construct
  source 1..19: mol_type = other RNA
aaaaatataaatatatata

SEQ ID NO: 3793 - RNA, 19 nt, synthetic construct
  source 1..19: mol_type = other RNA
aaaaatatataaatatata

SEQ ID NO: 3794 - RNA, 19 nt, synthetic construct
  source 1..19: mol_type = other RNA
aaataaaaaaaaatataaa

SEQ ID NO: 3795 - RNA, 19 nt, synthetic construct
  source 1..19: mol_type = other RNA
aaatataaaaaaaaataaa

SEQ ID NO: 3796 - RNA, 19 nt, synthetic construct
  source 1..19: mol_type = other RNA
aaaaaaaaaaaatatataa

SEQ ID NO: 3797 - RNA, 19 nt, synthetic construct
  source 1..19: mol_type = other RNA
aaataaaaataaatataaa

SEQ ID NO: 3798 - RNA, 19 nt, synthetic construct
  source 1..19: mol_type = other RNA
aaataaataaaaatataaa

SEQ ID NO: 3799 - RNA, 19 nt, synthetic construct
  source 1..19: mol_type = other RNA
aaataaatataaaaataaa

SEQ ID NO: 3800 - RNA, 19 nt, synthetic construct
  source 1..19: mol_type = other RNA
aaatataaataaaaataaa

SEQ ID NO: 3801 - RNA, 19 nt, synthetic construct
  source 1..19: mol_type = other RNA
aaataaaaatataaataaa

SEQ ID NO: 3802 - RNA, 19 nt, synthetic construct
  source 1..19: mol_type = other RNA
aaatataaaaataaataaa

SEQ ID NO: 3803 - RNA, 19 nt, synthetic construct
  source 1..19: mol_type = other RNA
aaaaaaaataaatatataa

SEQ ID NO: 3804 - RNA, 19 nt, synthetic construct
  source 1..19: mol_type = other RNA
aaaaaaaatatataaataa

SEQ ID NO: 3805 - RNA, 19 nt, synthetic construct
  source 1..19: mol_type = other RNA
aaaataaataaatatataa

SEQ ID NO: 3806 - RNA, 19 nt, synthetic construct
  source 1..19: mol_type = other RNA
aaaatatataaataaataa

SEQ ID NO: 3807 - RNA, 19 nt, synthetic construct
  source 1..19: mol_type = other RNA
aaaataaatatataaataa

SEQ ID NO: 3808 - RNA, 19 nt, synthetic construct
  source 1..19: mol_type = other RNA
aaaatataaatataaatat

SEQ ID NO: 3809 - RNA, 19 nt, synthetic construct
  source 1..19: mol_type = other RNA
aataaaaaaaaaaaatata

SEQ ID NO: 3810 - RNA, 19 nt, synthetic construct
  source 1..19: mol_type = other RNA
aaaaaaaaaaatatataaa

SEQ ID NO: 3811 - RNA, 19 nt, synthetic construct
  source 1..19: mol_type = other RNA
aataaaaaaaataaatata

SEQ ID NO: 3812 - RNA, 19 nt, synthetic construct
  source 1..19: mol_type = other RNA
aataaataaaaaaaatata

SEQ ID NO: 3813 - RNA, 19 nt, synthetic construct
  source 1..19: mol_type = other RNA
aaaaaaataaatatataaa

SEQ ID NO: 3814 - RNA, 19 nt, synthetic construct
  source 1..19: mol_type = other RNA
aaaaaaatatataaataaa

SEQ ID NO: 3815 - RNA, 19 nt, synthetic construct
  source 1..19: mol_type = other RNA
taataaataaataaatata

SEQ ID NO: 3816 - RNA, 19 nt, synthetic construct
  source 1..19: mol_type = other RNA
aaataaaaaaatatatata

SEQ ID NO: 3817 - RNA, 19 nt, synthetic construct
  source 1..19: mol_type = other RNA
aaatatataaatataaata

SEQ ID NO: 3818 - RNA, 19 nt, synthetic construct
  source 1..19: mol_type = other RNA
aaatataaatatataaata

SEQ ID NO: 3819 - RNA, 19 nt, synthetic construct
  source 1..19: mol_type = other RNA
ataaataaataaataaata

SEQ ID NO: 3820 - RNA, 19 nt, synthetic construct
  source 1..19: mol_type = other RNA
aataaataaaataaatata

SEQ ID NO: 3821 - RNA, 19 nt, synthetic construct
  source 1..19: mol_type = other RNA
aataaaataaataaatata

SEQ ID NO: 3822 - RNA, 19 nt, synthetic construct
  source 1..19: mol_type = other RNA
aataaataaataaaatata

SEQ ID NO: 3823 - RNA, 19 nt, synthetic construct
  source 1..19: mol_type = other RNA
aaaaaaaaaaaaatataat

SEQ ID NO: 3824 - RNA, 19 nt, synthetic construct
  source 1..19: mol_type = other RNA
aaatataaaaaaaaaatat

SEQ ID NO: 3825 - RNA, 19 nt, synthetic construct
  source 1..19: mol_type = other RNA
aataaataaataaatatat

SEQ ID NO: 3826 - RNA, 19 nt, synthetic construct
  source 1..19: mol_type = other RNA
aaaaaaaaataaatataat

SEQ ID NO: 3827 - RNA, 19 nt, synthetic construct
  source 1..19: mol_type = other RNA
aaaaaaaaatataaataat

SEQ ID NO: 3828 - RNA, 19 nt, synthetic construct
  source 1..19: mol_type = other RNA
atataaataaataaataaa

SEQ ID NO: 3829 - RNA, 20 nt, synthetic construct
  source 1..20: mol_type = other RNA
aaaaaaaaaaaaaaaatata

SEQ ID NO: 3830 - RNA, 20 nt, synthetic construct
  source 1..20: mol_type = other RNA
aaaaaaaaaaaataaatata

SEQ ID NO: 3831 - RNA, 20 nt, synthetic construct
  source 1..20: mol_type = other RNA
aaaaaaaataaataaatata

SEQ ID NO: 3832 - RNA, 20 nt, synthetic construct
  source 1..20: mol_type = other RNA
aaaataaataaataaatata

SEQ ID NO: 3833 - RNA, 20 nt, synthetic construct
  source 1..20: mol_type = other RNA
aaataaatataaataaataa

SEQ ID NO: 3834 - RNA, 20 nt, synthetic construct
  source 1..20: mol_type = other RNA
aaataaataaataaatataa

SEQ ID NO: 3835 - RNA, 20 nt, synthetic construct
  source 1..20: mol_type = other RNA
aaataaataaatataaataa

SEQ ID NO: 3836 - RNA, 20 nt, synthetic construct
  source 1..20: mol_type = other RNA
aaatataaataaataaataa

SEQ ID NO: 3837 - RNA, 20 nt, synthetic construct
  source 1..20: mol_type = other RNA
aaataaataaatataaatat

SEQ ID NO: 3838 - RNA, 20 nt, synthetic construct
  source 1..20: mol_type = other RNA
aaataaatataaataaatat

SEQ ID NO: 3839 - RNA, 20 nt, synthetic construct
  source 1..20: mol_type = other RNA
aaatataaataaataaatat

SEQ ID NO: 3840 - RNA, 20 nt, synthetic construct
  source 1..20: mol_type = other RNA
aaaaaaaaaatataaatata

SEQ ID NO: 3841 - RNA, 20 nt, synthetic construct
  source 1..20: mol_type = other RNA
aaaaaataaatataaatata

SEQ ID NO: 3842 - RNA, 20 nt, synthetic construct
  source 1..20: mol_type = other RNA
aaaaaatataaataaatata

SEQ ID NO: 3843 - RNA, 20 nt, synthetic construct
  source 1..20: mol_type = other RNA
aaataaaaaaaaaaaatata

SEQ ID NO: 3844 - RNA, 20 nt, synthetic construct
  source 1..20: mol_type = other RNA
aaataaaaaaaataaatata

SEQ ID NO: 3845 - RNA, 20 nt, synthetic construct
  source 1..20: mol_type = other RNA
aaataaataaaaaaaatata

SEQ ID NO: 3846 - RNA, 20 nt, synthetic construct
  source 1..20: mol_type = other RNA
aaataaataaaataaatata

SEQ ID NO: 3847 - RNA, 20 nt, synthetic construct
  source 1..20: mol_type = other RNA
aaataaaataaataaatata

SEQ ID NO: 3848 - RNA, 20 nt, synthetic construct
  source 1..20: mol_type = other RNA
aaataaataaataaaatata

SEQ ID NO: 3849 - RNA, 20 nt, synthetic construct
  source 1..20: mol_type = other RNA
aaaaaaaaaaaaaatatata

SEQ ID NO: 3850 - RNA, 20 nt, synthetic construct
  source 1..20: mol_type = other RNA
aaataaataaataaatatat

SEQ ID NO: 3851 - RNA, 20 nt, synthetic construct
  source 1..20: mol_type = other RNA
aaaaaaaaaataaatatata

SEQ ID NO: 3852 - RNA, 20 nt, synthetic construct
  source 1..20: mol_type = other RNA
aaaaaaaaaaaaaaaaataa

SEQ ID NO: 3853 - RNA, 20 nt, synthetic construct
  source 1..20: mol_type = other RNA
aaaaaataaataaatatata

SEQ ID NO: 3854 - RNA, 20 nt, synthetic construct
  source 1..20: mol_type = other RNA
aaaaaaaaaaaaataaataa

SEQ ID NO: 3855 - RNA, 20 nt, synthetic construct
  source 1..20: mol_type = other RNA
aaaaaaaaataaataaataa

SEQ ID NO: 3856 - RNA, 20 nt, synthetic construct
  source 1..20: mol_type = other RNA
aaaaaaaaaaaaaaaataaa

SEQ ID NO: 3857 - RNA, 20 nt, synthetic construct
  source 1..20: mol_type = other RNA
aaaaataaataaataaataa

SEQ ID NO: 3858 - RNA, 20 nt, synthetic construct
  source 1..20: mol_type = other RNA
aaaaaaaaaaaataaataaa

SEQ ID NO: 3859 - RNA, 20 nt, synthetic construct
  source 1..20: mol_type = other RNA
aaaaaaaataaataaataaa

SEQ ID NO: 3860 - RNA, 20 nt, synthetic construct
  source 1..20: mol_type = other RNA
aaaataaataaataaataaa

SEQ ID NO: 3861 - RNA, 20 nt, synthetic construct
  source 1..20: mol_type = other RNA
aaaaaaaaaaaaaaaaatat

SEQ ID NO: 3862 - RNA, 20 nt, synthetic construct
  source 1..20: mol_type = other RNA
taaataaataaataaatata

SEQ ID NO: 3863 - RNA, 20 nt, synthetic construct
  source 1..20: mol_type = other RNA
aaaaaaaaaaaaataaatat

SEQ ID NO: 3864 - RNA, 20 nt, synthetic construct
  source 1..20: mol_type = other RNA
aaaaaaaaataaataaatat

SEQ ID NO: 3865 - RNA, 20 nt, synthetic construct
  source 1..20: mol_type = other RNA
aaaaataaataaataaatat

SEQ ID NO: 3866 - RNA, 20 nt, synthetic construct
  source 1..20: mol_type = other RNA
aataaataaatataaatata

SEQ ID NO: 3867 - RNA, 20 nt, synthetic construct
  source 1..20: mol_type = other RNA
aataaatataaataaatata

SEQ ID NO: 3868 - RNA, 20 nt, synthetic construct
  source 1..20: mol_type = other RNA
aatataaataaataaatata

SEQ ID NO: 3869 - RNA, 20 nt, synthetic construct
  source 1..20: mol_type = other RNA
aaaaaaaaaaaaaaaaaata

SEQ ID NO: 3870 - RNA, 20 nt, synthetic construct
  source 1..20: mol_type = other RNA
aaaaaaaaaaaaaataaata

SEQ ID NO: 3871 - RNA, 20 nt, synthetic construct
  source 1..20: mol_type = other RNA
aaaatataaatataaatata

SEQ ID NO: 3872 - RNA, 20 nt, synthetic construct
  source 1..20: mol_type = other RNA
aaaaaaaaaataaataaata

SEQ ID NO: 3873 - RNA, 20 nt, synthetic construct
  source 1..20: mol_type = other RNA
aaaaaataaataaataaata

SEQ ID NO: 3874 - RNA, 20 nt, synthetic construct
  source 1..20: mol_type = other RNA
aaatataaaaaaaaaatata

SEQ ID NO: 3875 - RNA, 20 nt, synthetic construct
  source 1..20: mol_type = other RNA
aataaataaataaatatata

SEQ ID NO: 3876 - RNA, 20 nt, synthetic construct
  source 1..20: mol_type = other RNA
aaatataaaaaataaatata

SEQ ID NO: 3877 - RNA, 20 nt, synthetic construct
  source 1..20: mol_type = other RNA
aaatataaataaaaaatata

SEQ ID NO: 3878 - RNA, 20 nt, synthetic construct
  source 1..20: mol_type = other RNA
aaataaaaaatataaatata

SEQ ID NO: 3879 - RNA, 20 nt, synthetic construct
  source 1..20: mol_type = other RNA
aaataaatataaaaaatata

SEQ ID NO: 3880 - RNA, 20 nt, synthetic construct
  source 1..20: mol_type = other RNA
aaaaaaaatatataaatata

SEQ ID NO: 3881 - RNA, 20 nt, synthetic construct
  source 1..20: mol_type = other RNA
aaaaaaaatataaatatata

SEQ ID NO: 3882 - RNA, 20 nt, synthetic construct
  source 1..20: mol_type = other RNA
aaaaaaaaaaaaaaatataa

SEQ ID NO: 3883 - RNA, 20 nt, synthetic construct
  source 1..20: mol_type = other RNA
aaaataaatataaatatata

SEQ ID NO: 3884 - RNA, 20 nt, synthetic construct
  source 1..20: mol_type = other RNA
aaaataaatatataaatata

SEQ ID NO: 3885 - RNA, 20 nt, synthetic construct
  source 1..20: mol_type = other RNA
aaaatataaataaatatata

SEQ ID NO: 3886 - RNA, 20 nt, synthetic construct
  source 1..20: mol_type = other RNA
aaaatatataaataaatata

SEQ ID NO: 3887 - RNA, 20 nt, synthetic construct
  source 1..20: mol_type = other RNA
aaaaaaaaaaataaatataa

SEQ ID NO: 3888 - RNA, 20 nt, synthetic construct
  source 1..20: mol_type = other RNA
aaaaaaaaaaatataaataa

SEQ ID NO: 3889 - RNA, 20 nt, synthetic construct
  source 1..20: mol_type = other RNA
aaaaaaatataaataaataa

SEQ ID NO: 3890 - RNA, 20 nt, synthetic construct
  source 1..20: mol_type = other RNA
aaaaaaataaataaatataa

SEQ ID NO: 3891 - RNA, 20 nt, synthetic construct
  source 1..20: mol_type = other RNA
aaaaaaataaatataaataa

SEQ ID NO: 3892 - RNA, 20 nt, synthetic construct
  source 1..20: mol_type = other RNA
aaaaaaaaaaaaaatataaa

SEQ ID NO: 3893 - RNA, 20 nt, synthetic construct
  source 1..20: mol_type = other RNA
aaaaaaaaaataaatataaa

SEQ ID NO: 3894 - RNA, 20 nt, synthetic construct
  source 1..20: mol_type = other RNA
aaaaaaaaaatataaataaa

SEQ ID NO: 3895 - RNA, 20 nt, synthetic construct
  source 1..20: mol_type = other RNA
aaataaaaaaaaaatatata

SEQ ID NO: 3896 - RNA, 20 nt, synthetic construct
  source 1..20: mol_type = other RNA
aaaaaataaatataaataaa

SEQ ID NO: 3897 - RNA, 20 nt, synthetic construct
  source 1..20: mol_type = other RNA
aaaaaataaataaatataaa

SEQ ID NO: 3898 - RNA, 20 nt, synthetic construct
  source 1..20: mol_type = other RNA
aaaaaatataaataaataaa

SEQ ID NO: 3899 - RNA, 20 nt, synthetic construct
  source 1..20: mol_type = other RNA
aaataaataaaaaatatata

SEQ ID NO: 3900 - RNA, 20 nt, synthetic construct
  source 1..20: mol_type = other RNA
aaataaaaaataaatatata

SEQ ID NO: 3901 - RNA, 20 nt, synthetic construct
  source 1..20: mol_type = other RNA
aaataaaaaaaaaaaaataa

SEQ ID NO: 3902 - RNA, 20 nt, synthetic construct
  source 1..20: mol_type = other RNA
aaataaaaaaaaataaataa

SEQ ID NO: 3903 - RNA, 20 nt, synthetic construct
  source 1..20: mol_type = other RNA
aaataaataaaaaaaaataa

SEQ ID NO: 3904 - RNA, 20 nt, synthetic construct
  source 1..20: mol_type = other RNA
aaaaaaaaaaaatatatata

SEQ ID NO: 3905 - RNA, 20 nt, synthetic construct
  source 1..20: mol_type = other RNA
aaataaataaaaataaataa

SEQ ID NO: 3906 - RNA, 20 nt, synthetic construct
  source 1..20: mol_type = other RNA
aaataaataaataaaaataa

SEQ ID NO: 3907 - RNA, 20 nt, synthetic construct
  source 1..20: mol_type = other RNA
aaataaaaataaataaataa

SEQ ID NO: 3908 - RNA, 20 nt, synthetic construct
  source 1..20: mol_type = other RNA
aaataaataaataaatatac

SEQ ID NO: 3909 - RNA, 20 nt, synthetic construct
  source 1..20: mol_type = other RNA
aaaaaaaataaatatatata

SEQ ID NO: 3910 - RNA, 20 nt, synthetic construct
  source 1..20: mol_type = other RNA
aaataaaaaaaaaaaataaa

SEQ ID NO: 3911 - RNA, 20 nt, synthetic construct
  source 1..20: mol_type = other RNA
aaaataaataaatatatata

SEQ ID NO: 3912 - RNA, 20 nt, synthetic construct
  source 1..20: mol_type = other RNA
aaataaaaaaaataaataaa

SEQ ID NO: 3913 - RNA, 20 nt, synthetic construct
  source 1..20: mol_type = other RNA
aaataaataaaaaaaataaa

SEQ ID NO: 3914 - RNA, 20 nt, synthetic construct
  source 1..20: mol_type = other RNA
aaaaaaaaaaatataaatat

SEQ ID NO: 3915 - RNA, 20 nt, synthetic construct
  source 1..20: mol_type = other RNA
aaataaataaataaaataaa

SEQ ID NO: 3916 - RNA, 20 nt, synthetic construct
  source 1..20: mol_type = other RNA
aaataaataaaataaataaa

SEQ ID NO: 3917 - RNA, 20 nt, synthetic construct
  source 1..20: mol_type = other RNA
aaataaaataaataaataaa

SEQ ID NO: 3918 - RNA, 20 nt, synthetic construct
  source 1..20: mol_type = other RNA
aaaaaaataaatataaatat

SEQ ID NO: 3919 - RNA, 20 nt, synthetic construct
  source 1..20: mol_type = other RNA
aaaaaaatataaataaatat

SEQ ID NO: 3920 - RNA, 20 nt, synthetic construct
  source 1..20: mol_type = other RNA
aaatataaatataaatataa

SEQ ID NO: 3921 - RNA, 20 nt, synthetic construct
  source 1..20: mol_type = other RNA
aaaaaaaaaaaaaaaataat

SEQ ID NO: 3922 - RNA, 20 nt, synthetic construct
  source 1..20: mol_type = other RNA
aaataaaaaaaaaaaaatat

SEQ ID NO: 3923 - RNA, 20 nt, synthetic construct
  source 1..20: mol_type = other RNA
aaaaaaaaaaaataaataat

SEQ ID NO: 3924 - RNA, 20 nt, synthetic construct
  source 1..20: mol_type = other RNA
aaataaataaaaaaaaatat

SEQ ID NO: 3925 - RNA, 20 nt, synthetic construct
  source 1..20: mol_type = other RNA
aaataaaaaaaaataaatat

SEQ ID NO: 3926 - RNA, 20 nt, synthetic construct
  source 1..20: mol_type = other RNA
aaaaaaaataaataaataat

SEQ ID NO: 3927 - RNA, 20 nt, synthetic construct
  source 1..20: mol_type = other RNA
aaataaataaaaataaatat

SEQ ID NO: 3928 - RNA, 20 nt, synthetic construct
  source 1..20: mol_type = other RNA
aaataaataaataaaaatat

SEQ ID NO: 3929 - RNA, 20 nt, synthetic construct
  source 1..20: mol_type = other RNA
aaataaaaataaataaatat

SEQ ID NO: 3930 - RNA, 20 nt, synthetic construct
  source 1..20: mol_type = other RNA
aaaataaataaataaataat

SEQ ID NO: 3931 - RNA, 20 nt, synthetic construct
  source 1..20: mol_type = other RNA
aaaaataaaaaaaaaatata

SEQ ID NO: 3932 - RNA, 20 nt, synthetic construct
  source 1..20: mol_type = other RNA
aaaaaaataaaaaaaatata

SEQ ID NO: 3933 - RNA, 20 nt, synthetic construct
  source 1..20: mol_type = other RNA
aaaaaaaaataaaaaatata

SEQ ID NO: 3934 - RNA, 20 nt, synthetic construct
  source 1..20: mol_type = other RNA
aaaataaaaaaaaaaatata

SEQ ID NO: 3935 - RNA, 20 nt, synthetic construct
  source 1..20: mol_type = other RNA
aaaaaaaaaaataaaatata

SEQ ID NO: 3936 - RNA, 20 nt, synthetic construct
  source 1..20: mol_type = other RNA
aaaaaaaaaataaaaatata

SEQ ID NO: 3937 - RNA, 20 nt, synthetic construct
  source 1..20: mol_type = other RNA
aaaaaaaataaaaaaatata

SEQ ID NO: 3938 - RNA, 20 nt, synthetic construct
  source 1..20: mol_type = other RNA
aaaaaataaaaaaaaatata

SEQ ID NO: 3939 - RNA, 20 nt, synthetic construct
  source 1..20: mol_type = other RNA
aaaaaaaaaaaaaaatatat

SEQ ID NO: 3940 - RNA, 20 nt, synthetic construct
  source 1..20: mol_type = other RNA
aaaaataaataaaaaatata

SEQ ID NO: 3941 - RNA, 20 nt, synthetic construct
  source 1..20: mol_type = other RNA
aaaaaaataaaataaatata

SEQ ID NO: 3942 - RNA, 20 nt, synthetic construct
  source 1..20: mol_type = other RNA
aaaataaaaaaataaatata

SEQ ID NO: 3943 - RNA, 20 nt, synthetic construct
  source 1..20: mol_type = other RNA
aaaaaataaataaaaatata

SEQ ID NO: 3944 - RNA, 20 nt, synthetic construct
  source 1..20: mol_type = other RNA
aaaaaataaaaataaatata

SEQ ID NO: 3945 - RNA, 20 nt, synthetic construct
  source 1..20: mol_type = other RNA
aaaataaataaaaaaatata

SEQ ID NO: 3946 - RNA, 20 nt, synthetic construct
  source 1..20: mol_type = other RNA
aaaaaaataaataaaatata

SEQ ID NO: 3947 - RNA, 20 nt, synthetic construct
  source 1..20: mol_type = other RNA
aaaaataaaaaataaatata

SEQ ID NO: 3948 - RNA, 20 nt, synthetic construct
  source 1..20: mol_type = other RNA
aaaaaaaaaaaaaaaaaaaa

SEQ ID NO: 3949 - RNA, 20 nt, synthetic construct
  source 1..20: mol_type = other RNA
aaaaaaaaaaataaatatat

SEQ ID NO: 3950 - RNA, 20 nt, synthetic construct
  source 1..20: mol_type = other RNA
aaataataaatataaatata

SEQ ID NO: 3951 - RNA, 20 nt, synthetic construct
  source 1..20: mol_type = other RNA
aaatataaataataaatata

SEQ ID NO: 3952 - RNA, 20 nt, synthetic construct
  source 1..20: mol_type = other RNA
aaataaataatataaatata

SEQ ID NO: 3953 - RNA, 20 nt, synthetic construct
  source 1..20: mol_type = other RNA
aaataatataaataaatata

SEQ ID NO: 3954 - RNA, 20 nt, synthetic construct
  source 1..20: mol_type = other RNA
aaataaataaatataatata

SEQ ID NO: 3955 - RNA, 20 nt, synthetic construct
  source 1..20: mol_type = other RNA
aaataaatataaataatata

SEQ ID NO: 3956 - RNA, 20 nt, synthetic construct
  source 1..20: mol_type = other RNA
aaatataaataaataatata

SEQ ID NO: 3957 - RNA, 20 nt, synthetic construct
  source 1..20: mol_type = other RNA
aaataaatataataaatata

SEQ ID NO: 3958 - RNA, 20 nt, synthetic construct
  source 1..20: mol_type = other RNA
aaatataataaataaatata

SEQ ID NO: 3959 - RNA, 20 nt, synthetic construct
  source 1..20: mol_type = other RNA
aaaaaaataaataaatatat

SEQ ID NO: 3960 - RNA, 20 nt, synthetic construct
  source 1..20: mol_type = other RNA
aaataaatatataaatataa

SEQ ID NO: 3961 - RNA, 20 nt, synthetic construct
  source 1..20: mol_type = other RNA
aaataaatataaatatataa

SEQ ID NO: 3962 - RNA, 20 nt, synthetic construct
  source 1..20: mol_type = other RNA
aaatataaataaatatataa

SEQ ID NO: 3963 - RNA, 20 nt, synthetic construct
  source 1..20: mol_type = other RNA
aaatataaatatataaataa

SEQ ID NO: 3964 - RNA, 20 nt, synthetic construct
  source 1..20: mol_type = other RNA
aaatatataaataaatataa

SEQ ID NO: 3965 - RNA, 20 nt, synthetic construct
  source 1..20: mol_type = other RNA
aaatatataaatataaataa

SEQ ID NO: 3966 - RNA, 20 nt, synthetic construct
  source 1..20: mol_type = other RNA
ataaataaataaataaataa

SEQ ID NO: 3967 - RNA, 20 nt, synthetic construct
  source 1..20: mol_type = other RNA
taaataaataaataaataaa

SEQ ID NO: 3968 - RNA, 20 nt, synthetic construct
  source 1..20: mol_type = other RNA
aaataaataaataaataaat

SEQ ID NO: 3969 - RNA, 20 nt, synthetic construct
  source 1..20: mol_type = other RNA
aataaataaataaataaata

SEQ ID NO: 3970 - RNA, 20 nt, synthetic construct
  source 1..20: mol_type = other RNA
aaaaaaaaaaaatataaata

SEQ ID NO: 3971 - RNA, 20 nt, synthetic construct
  source 1..20: mol_type = other RNA
aaaaaaaatataaataaata

SEQ ID NO: 3972 - RNA, 20 nt, synthetic construct
  source 1..20: mol_type = other RNA
aaaaaaaataaatataaata

SEQ ID NO: 3973 - RNA, 20 nt, synthetic construct
  source 1..20: mol_type = other RNA
aaaataaatataaataaata

SEQ ID NO: 3974 - RNA, 20 nt, synthetic construct
  source 1..20: mol_type = other RNA
aaaatataaataaataaata

SEQ ID NO: 3975 - RNA, 20 nt, synthetic construct
  source 1..20: mol_type = other RNA
aaaataaataaatataaata

SEQ ID NO: 3976 - RNA, 20 nt, synthetic construct
  source 1..20: mol_type = other RNA
aaataataaataaatatata

SEQ ID NO: 3977 - RNA, 20 nt, synthetic construct
  source 1..20: mol_type = other RNA
aaataaataataaatatata

SEQ ID NO: 3978 - RNA, 20 nt, synthetic construct
  source 1..20: mol_type = other RNA
aaataaataaataatatata

SEQ ID NO: 3979 - RNA, 20 nt, synthetic construct
  source 1..20: mol_type = other RNA
aaataaaaaaaaaaaaaata

SEQ ID NO: 3980 - RNA, 20 nt, synthetic construct
  source 1..20: mol_type = other RNA
aaatataaaatataaatata

SEQ ID NO: 3981 - RNA, 20 nt, synthetic construct
  source 1..20: mol_type = other RNA
aaatataaatataaaatata

SEQ ID NO: 3982 - RNA, 20 nt, synthetic construct
  source 1..20: mol_type = other RNA
aaataaataaaaaaaaaata

SEQ ID NO: 3983 - RNA, 20 nt, synthetic construct
  source 1..20: mol_type = other RNA
aaataaaaaaaaaataaata

SEQ ID NO: 3984 - RNA, 20 nt, synthetic construct
  source 1..20: mol_type = other RNA
aaataaatatatataaataa

SEQ ID NO: 3985 - RNA, 20 nt, synthetic construct
  source 1..20: mol_type = other RNA
aaataaataaatatatataa

SEQ ID NO: 3986 - RNA, 20 nt, synthetic construct
  source 1..20: mol_type = other RNA
aaatatatataaataaataa

SEQ ID NO: 3987 - RNA, 20 nt, synthetic construct
  source 1..20: mol_type = other RNA
aaatataaatataaatatat

SEQ ID NO: 3988 - RNA, 20 nt, synthetic construct
  source 1..20: mol_type = other RNA
aaatatataaatataaatat

SEQ ID NO: 3989 - RNA, 20 nt, synthetic construct
  source 1..20: mol_type = other RNA
aaatataaatatataaatat

SEQ ID NO: 3990 - RNA, 20 nt, synthetic construct
  source 1..20: mol_type = other RNA
ataaataaataaataaatat

SEQ ID NO: 3991 - RNA, 20 nt, synthetic construct
  source 1..20: mol_type = other RNA
aaataaataaaaaataaata

SEQ ID NO: 3992 - RNA, 20 nt, synthetic construct
  source 1..20: mol_type = other RNA
aaataaaaaataaataaata

SEQ ID NO: 3993 - RNA, 20 nt, synthetic construct
  source 1..20: mol_type = other RNA
aaataaataaataaaaaata

SEQ ID NO: 3994 - RNA, 20 nt, synthetic construct
  source 1..20: mol_type = other RNA
aatataaataaataaataaa

SEQ ID NO: 3995 - RNA, 20 nt, synthetic construct
  source 1..20: mol_type = other RNA
aataaataaatataaataaa

SEQ ID NO: 3996 - RNA, 20 nt, synthetic construct
  source 1..20: mol_type = other RNA
aataaataaataaatataaa

SEQ ID NO: 3997 - RNA, 20 nt, synthetic construct
  source 1..20: mol_type = other RNA
aataaatataaataaataaa

SEQ ID NO: 3998 - RNA, 20 nt, synthetic construct
  source 1..20: mol_type = other RNA
aaaaaaaaatataaatataa

SEQ ID NO: 3999 - RNA, 20 nt, synthetic construct
  source 1..20: mol_type = other RNA
aaaaatataaatataaataa

SEQ ID NO: 4000 - RNA, 20 nt, synthetic construct
  source 1..20: mol_type = other RNA
aaaaatataaataaatataa

SEQ ID NO: 4001 - RNA, 20 nt, synthetic construct
  source 1..20: mol_type = other RNA
aaaaataaatataaatataa

SEQ ID NO: 4002 - RNA, 20 nt, synthetic construct
  source 1..20: mol_type = other RNA
aaaaaaaatataaatataaa

SEQ ID NO: 4003 - RNA, 20 nt, synthetic construct
  source 1..20: mol_type = other RNA
aaatataaaaaaaatatata

SEQ ID NO: 4004 - RNA, 20 nt, synthetic construct
  source 1..20: mol_type = other RNA
aaatatataaaaaaaatata

SEQ ID NO: 4005 - RNA, 20 nt, synthetic construct
  source 1..20: mol_type = other RNA
aaaatataaatataaataaa

SEQ ID NO: 4006 - RNA, 20 nt, synthetic construct
  source 1..20: mol_type = other RNA
aaaatataaataaatataaa

SEQ ID NO: 4007 - RNA, 20 nt, synthetic construct
  source 1..20: mol_type = other RNA
aaaataaatataaatataaa

SEQ ID NO: 4008 - RNA, 20 nt, synthetic construct
  source 1..20: mol_type = other RNA
aaataaatataaaatatata

SEQ ID NO: 4009 - RNA, 20 nt, synthetic construct
  source 1..20: mol_type = other RNA
aaatataaataaaatatata

SEQ ID NO: 4010 - RNA, 20 nt, synthetic construct
  source 1..20: mol_type = other RNA
aaataaaatatataaatata

SEQ ID NO: 4011 - RNA, 20 nt, synthetic construct
  source 1..20: mol_type = other RNA
aaataaaatataaatatata

SEQ ID NO: 4012 - RNA, 20 nt, synthetic construct
  source 1..20: mol_type = other RNA
aaatatataaaataaatata

SEQ ID NO: 4013 - RNA, 20 nt, synthetic construct
  source 1..20: mol_type = other RNA
aaatataaaataaatatata

SEQ ID NO: 4014 - RNA, 20 nt, synthetic construct
  source 1..20: mol_type = other RNA
aaataaatatataaaatata

SEQ ID NO: 4015 - RNA, 20 nt, synthetic construct
  source 1..20: mol_type = other RNA
aaatatataaataaaatata

SEQ ID NO: 4016 - RNA, 20 nt, synthetic construct
  source 1..20: mol_type = other RNA
aaaaaaaaaaaaataatata

SEQ ID NO: 4017 - RNA, 20 nt, synthetic construct
  source 1..20: mol_type = other RNA
aaatataaaaaaaaaaataa

SEQ ID NO: 4018 - RNA, 20 nt, synthetic construct
  source 1..20: mol_type = other RNA
aaataaaaaaaaaaatataa

SEQ ID NO: 4019 - RNA, 20 nt, synthetic construct
  source 1..20: mol_type = other RNA
aaaaaaaaataataaatata

SEQ ID NO: 4020 - RNA, 20 nt, synthetic construct
  source 1..20: mol_type = other RNA
aaaaaaaaataaataatata

SEQ ID NO: 4021 - RNA, 20 nt, synthetic construct
  source 1..20: mol_type = other RNA
aaatatatataaataaatat

SEQ ID NO: 4022 - RNA, 20 nt, synthetic construct
  source 1..20: mol_type = other RNA
aaataaatatataaatatat

SEQ ID NO: 4023 - RNA, 20 nt, synthetic construct
  source 1..20: mol_type = other RNA
aaatataaataaatatatat

SEQ ID NO: 4024 - RNA, 20 nt, synthetic construct
  source 1..20: mol_type = other RNA
aaatatataaataaatatat

SEQ ID NO: 4025 - RNA, 20 nt, synthetic construct
  source 1..20: mol_type = other RNA
aaataaatatatataaatat

SEQ ID NO: 4026 - RNA, 20 nt, synthetic construct
  source 1..20: mol_type = other RNA
aaataaatataaatatatat

SEQ ID NO: 4027 - RNA, 20 nt, synthetic construct
  source 1..20: mol_type = other RNA
aaataaatataaaaaaataa

SEQ ID NO: 4028 - RNA, 20 nt, synthetic construct
  source 1..20: mol_type = other RNA
aaatataaaaaaataaataa

SEQ ID NO: 4029 - RNA, 20 nt, synthetic construct
  source 1..20: mol_type = other RNA
aaataaataaaaaaatataa

SEQ ID NO: 4030 - RNA, 20 nt, synthetic construct
  source 1..20: mol_type = other RNA
aaatataaataaaaaaataa

SEQ ID NO: 4031 - RNA, 20 nt, synthetic construct
  source 1..20: mol_type = other RNA
aaataaaaaaataaatataa

SEQ ID NO: 4032 - RNA, 20 nt, synthetic construct
  source 1..20: mol_type = other RNA
aaataaaaaaatataaataa

SEQ ID NO: 4033 - RNA, 21 nt, synthetic construct
  source 1..21: mol_type = other RNA
aaataaatataaataaatata

SEQ ID NO: 4034 - RNA, 21 nt, synthetic construct
  source 1..21: mol_type = other RNA
aaataaataaatataaatata

SEQ ID NO: 4035 - RNA, 21 nt, synthetic construct
  source 1..21: mol_type = other RNA
aaatataaataaataaatata

SEQ ID NO: 4036 - RNA, 21 nt, synthetic construct
  source 1..21: mol_type = other RNA
aaataaataaataaatatata

SEQ ID NO: 4037 - RNA, 21 nt, synthetic construct
  source 1..21: mol_type = other RNA
aaaaaaaaaaaaaaaaatata

SEQ ID NO: 4038 - RNA, 21 nt, synthetic construct
  source 1..21: mol_type = other RNA
aaaaaaaaaaaaataaatata

SEQ ID NO: 4039 - RNA, 21 nt, synthetic construct
  source 1..21: mol_type = other RNA
aaaaaaaaataaataaatata

SEQ ID NO: 4040 - RNA, 21 nt, synthetic construct
  source 1..21: mol_type = other RNA
aaaaataaataaataaatata

SEQ ID NO: 4041 - RNA, 21 nt, synthetic construct
  source 1..21: mol_type = other RNA
aaataaataaataaataaata

SEQ ID NO: 4042 - RNA, 21 nt, synthetic construct
  source 1..21: mol_type = other RNA
aaataaatataaataaataaa

SEQ ID NO: 4043 - RNA, 21 nt, synthetic construct
  source 1..21: mol_type = other RNA
aaataaataaataaatataaa

SEQ ID NO: 4044 - RNA, 21 nt, synthetic construct
  source 1..21: mol_type = other RNA
aaatataaataaataaataaa

SEQ ID NO: 4045 - RNA, 21 nt, synthetic construct
  source 1..21: mol_type = other RNA
aaataaataaatataaataaa

SEQ ID NO: 4046 - RNA, 21 nt, synthetic construct
  source 1..21: mol_type = other RNA
aaaaaaaaaaatataaatata

SEQ ID NO: 4047 - RNA, 21 nt, synthetic construct
  source 1..21: mol_type = other RNA
aaaaaaatataaataaatata

SEQ ID NO: 4048 - RNA, 21 nt, synthetic construct
  source 1..21: mol_type = other RNA
aaaaaaataaatataaatata

SEQ ID NO: 4049 - RNA, 21 nt, synthetic construct
  source 1..21: mol_type = other RNA
aaataaaaaaaaaaaaatata

SEQ ID NO: 4050 - RNA, 21 nt, synthetic construct
  source 1..21: mol_type = other RNA
aaataaataaaaaaaaatata

SEQ ID NO: 4051 - RNA, 21 nt, synthetic construct
  source 1..21: mol_type = other RNA
aaataaaaaaaaataaatata

SEQ ID NO: 4052 - RNA, 21 nt, synthetic construct
  source 1..21: mol_type = other RNA
aaataaaaataaataaatata

SEQ ID NO: 4053 - RNA, 21 nt, synthetic construct
  source 1..21: mol_type = other RNA
aaataaataaaaataaatata

SEQ ID NO: 4054 - RNA, 21 nt, synthetic construct
  source 1..21: mol_type = other RNA
aaataaataaataaaaatata

SEQ ID NO: 4055 - RNA, 21 nt, synthetic construct
  source 1..21: mol_type = other RNA
aaaaaaaaaaaaaaatatata

SEQ ID NO: 4056 - RNA, 21 nt, synthetic construct
  source 1..21: mol_type = other RNA
aaaaaaaaaaataaatatata

SEQ ID NO: 4057 - RNA, 21 nt, synthetic construct
  source 1..21: mol_type = other RNA
aaaaaaaaaaaaaaaaaataa

SEQ ID NO: 4058 - RNA, 21 nt, synthetic construct
  source 1..21: mol_type = other RNA
aaaaaaataaataaatatata

SEQ ID NO: 4059 - RNA, 21 nt, synthetic construct
  source 1..21: mol_type = other RNA
aaaaaaaaaaaaaataaataa

SEQ ID NO: 4060 - RNA, 21 nt, synthetic construct
  source 1..21: mol_type = other RNA
aaaaaaaaaataaataaataa

SEQ ID NO: 4061 - RNA, 21 nt, synthetic construct
  source 1..21: mol_type = other RNA
aaaaaaaaaaaaaaaaataaa

SEQ ID NO: 4062 - RNA, 21 nt, synthetic construct
  source 1..21: mol_type = other RNA
aaaaaataaataaataaataa

SEQ ID NO: 4063 - RNA, 21 nt, synthetic construct
  source 1..21: mol_type = other RNA
aaaaaaaaaaaaataaataaa

SEQ ID NO: 4064 - RNA, 21 nt, synthetic construct
  source 1..21: mol_type = other RNA
aaaaaaaaataaataaataaa

SEQ ID NO: 4065 - RNA, 21 nt, synthetic construct
  source 1..21: mol_type = other RNA
aaaaataaataaataaataaa

SEQ ID NO: 4066 - RNA, 21 nt, synthetic construct
  source 1..21: mol_type = other RNA
aaaaaaaaaaaaaaaaaatat

SEQ ID NO: 4067 - RNA, 21 nt, synthetic construct
  source 1..21: mol_type = other RNA
aaaaaaaaaaaaaataaatat

SEQ ID NO: 4068 - RNA, 21 nt, synthetic construct
  source 1..21: mol_type = other RNA
aaaaaaaaaataaataaatat

SEQ ID NO: 4069 - RNA, 21 nt, synthetic construct
  source 1..21: mol_type = other RNA
aaaaaataaataaataaatat

SEQ ID NO: 4070 - RNA, 21 nt, synthetic construct
  source 1..21: mol_type = other RNA
aaatatataaatataaatata

SEQ ID NO: 4071 - RNA, 21 nt, synthetic construct
  source 1..21: mol_type = other RNA
aaatataaatatataaatata

SEQ ID NO: 4072 - RNA, 21 nt, synthetic construct
  source 1..21: mol_type = other RNA
aaatataaatataaatatata

SEQ ID NO: 4073 - RNA, 21 nt, synthetic construct
  source 1..21: mol_type = other RNA
ataaataaataaataaatata

SEQ ID NO: 4074 - RNA, 21 nt, synthetic construct
  source 1..21: mol_type = other RNA
aaataaatataaatatatata

SEQ ID NO: 4075 - RNA, 21 nt, synthetic construct
  source 1..21: mol_type = other RNA
aaataaatatataaatatata

SEQ ID NO: 4076 - RNA, 21 nt, synthetic construct
  source 1..21: mol_type = other RNA
aaatatataaataaatatata

SEQ ID NO: 4077 - RNA, 21 nt, synthetic construct
  source 1..21: mol_type = other RNA
aaatataaataaatatatata

SEQ ID NO: 4078 - RNA, 21 nt, synthetic construct
  source 1..21: mol_type = other RNA
aaataaatatatataaatata

SEQ ID NO: 4079 - RNA, 21 nt, synthetic construct
  source 1..21: mol_type = other RNA
aaatatatataaataaatata

SEQ ID NO: 4080 - RNA, 21 nt, synthetic construct
  source 1..21: mol_type = other RNA
aaaaaaaaaaaaaaaaaaata

SEQ ID NO: 4081 - RNA, 21 nt, synthetic construct
  source 1..21: mol_type = other RNA
aaaaaaaaaaaaaaataaata

SEQ ID NO: 4082 - RNA, 21 nt, synthetic construct
  source 1..21: mol_type = other RNA
aaaaatataaatataaatata

SEQ ID NO: 4083 - RNA, 21 nt, synthetic construct
  source 1..21: mol_type = other RNA
aaaaaaaaaaataaataaata

SEQ ID NO: 4084 - RNA, 21 nt, synthetic construct
  source 1..21: mol_type = other RNA
aaaaaaataaataaataaata

SEQ ID NO: 4085 - RNA, 21 nt, synthetic construct
  source 1..21: mol_type = other RNA
aaataaatataaataaataat

SEQ ID NO: 4086 - RNA, 21 nt, synthetic construct
  source 1..21: mol_type = other RNA
aaatataaataaataaataat

SEQ ID NO: 4087 - RNA, 21 nt, synthetic construct
  source 1..21: mol_type = other RNA
aaataaataaataaatataat

SEQ ID NO: 4088 - RNA, 21 nt, synthetic construct
  source 1..21: mol_type = other RNA
aaataaataaatataaataat

SEQ ID NO: 4089 - RNA, 21 nt, synthetic construct
  source 1..21: mol_type = other RNA
aaatataaaaaaaaaaatata

SEQ ID NO: 4090 - RNA, 21 nt, synthetic construct
  source 1..21: mol_type = other RNA
aaataaataaatatatatata

SEQ ID NO: 4091 - RNA, 21 nt, synthetic construct
  source 1..21: mol_type = other RNA
aaatataaaaaaataaatata

SEQ ID NO: 4092 - RNA, 21 nt, synthetic construct
  source 1..21: mol_type = other RNA
aaatataaataaaaaaatata

SEQ ID NO: 4093 - RNA, 21 nt, synthetic construct
  source 1..21: mol_type = other RNA
aaataaatataaaaaaatata

SEQ ID NO: 4094 - RNA, 21 nt, synthetic construct
  source 1..21: mol_type = other RNA
aaataaaaaaatataaatata

SEQ ID NO: 4095 - RNA, 21 nt, synthetic construct
  source 1..21: mol_type = other RNA
aataaataaataaataaataa

SEQ ID NO: 4096 - RNA, 21 nt, synthetic construct
  source 1..21: mol_type = other RNA
aaaaaaaaatatataaatata

SEQ ID NO: 4097 - RNA, 21 nt, synthetic construct
  source 1..21: mol_type = other RNA
aaaaaaaaatataaatatata

SEQ ID NO: 4098 - RNA, 21 nt, synthetic construct
  source 1..21: mol_type = other RNA
aaaaaaaaaaaaaaaatataa

SEQ ID NO: 4099 - RNA, 21 nt, synthetic construct
  source 1..21: mol_type = other RNA
aaaaatataaataaatatata

SEQ ID NO: 4100 - RNA, 21 nt, synthetic construct
  source 1..21: mol_type = other RNA
aaaaataaatataaatatata

SEQ ID NO: 4101 - RNA, 21 nt, synthetic construct
  source 1..21: mol_type = other RNA
aaaaataaatatataaatata

SEQ ID NO: 4102 - RNA, 21 nt, synthetic construct
  source 1..21: mol_type = other RNA
aaaaatatataaataaatata

SEQ ID NO: 4103 - RNA, 21 nt, synthetic construct
  source 1..21: mol_type = other RNA
aaaaaaaaaaaataaatataa

SEQ ID NO: 4104 - RNA, 21 nt, synthetic construct
  source 1..21: mol_type = other RNA
aaaaaaaaaaaatataaataa

SEQ ID NO: 4105 - RNA, 21 nt, synthetic construct
  source 1..21: mol_type = other RNA
aaaaaaaataaataaatataa

SEQ ID NO: 4106 - RNA, 21 nt, synthetic construct
  source 1..21: mol_type = other RNA
aaaaaaaataaatataaataa

SEQ ID NO: 4107 - RNA, 21 nt, synthetic construct
  source 1..21: mol_type = other RNA
aaaaaaaatataaataaataa

SEQ ID NO: 4108 - RNA, 21 nt, synthetic construct
  source 1..21: mol_type = other RNA
aaaaaaaaaaaaaaatataaa

SEQ ID NO: 4109 - RNA, 21 nt, synthetic construct
  source 1..21: mol_type = other RNA
aaaatataaataaataaataa

SEQ ID NO: 4110 - RNA, 21 nt, synthetic construct
  source 1..21: mol_type = other RNA
aaaataaatataaataaataa

SEQ ID NO: 4111 - RNA, 21 nt, synthetic construct
  source 1..21: mol_type = other RNA
aaaataaataaatataaataa

SEQ ID NO: 4112 - RNA, 21 nt, synthetic construct
  source 1..21: mol_type = other RNA
aaaataaataaataaatataa

SEQ ID NO: 4113 - RNA, 21 nt, synthetic construct
  source 1..21: mol_type = other RNA
aaaaaaaaaaataaatataaa

SEQ ID NO: 4114 - RNA, 21 nt, synthetic construct
  source 1..21: mol_type = other RNA
aaaaaaaaaaatataaataaa

SEQ ID NO: 4115 - RNA, 21 nt, synthetic construct
  source 1..21: mol_type = other RNA
aaataaaaaaaaaaatatata

SEQ ID NO: 4116 - RNA, 21 nt, synthetic construct
  source 1..21: mol_type = other RNA
aaaaaaataaataaatataaa

SEQ ID NO: 4117 - RNA, 21 nt, synthetic construct
  source 1..21: mol_type = other RNA
aaaaaaataaatataaataaa

SEQ ID NO: 4118 - RNA, 21 nt, synthetic construct
  source 1..21: mol_type = other RNA
aaaaaaatataaataaataaa

SEQ ID NO: 4119 - RNA, 21 nt, synthetic construct
  source 1..21: mol_type = other RNA
aaataaataaaaaaatatata

SEQ ID NO: 4120 - RNA, 21 nt, synthetic construct
  source 1..21: mol_type = other RNA
aaataaaaaaataaatatata

SEQ ID NO: 4121 - RNA, 21 nt, synthetic construct
  source 1..21: mol_type = other RNA
aaatataaataaatataaata

SEQ ID NO: 4122 - RNA, 21 nt, synthetic construct
  source 1..21: mol_type = other RNA
aaataaatataaatataaata

SEQ ID NO: 4123 - RNA, 21 nt, synthetic construct
  source 1..21: mol_type = other RNA
aaatataaatataaataaata

SEQ ID NO: 4124 - RNA, 21 nt, synthetic construct
  source 1..21: mol_type = other RNA
aaataaaaaaaaaaaaaataa

SEQ ID NO: 4125 - RNA, 21 nt, synthetic construct
  source 1..21: mol_type = other RNA
aaataaaaaaaaaataaataa

SEQ ID NO: 4126 - RNA, 21 nt, synthetic construct
  source 1..21: mol_type = other RNA
aaataaataaaaaaaaaataa

SEQ ID NO: 4127 - RNA, 21 nt, synthetic construct
  source 1..21: mol_type = other RNA
aaaaaaaaaaaaatatatata

SEQ ID NO: 4128 - RNA, 21 nt, synthetic construct
  source 1..21: mol_type = other RNA
aataaataaataaataaatat

SEQ ID NO: 4129 - RNA, 21 nt, synthetic construct
  source 1..21: mol_type = other RNA
aaataaataaataaaaaataa

SEQ ID NO: 4130 - RNA, 21 nt, synthetic construct
  source 1..21: mol_type = other RNA
aaataaataaaaaataaataa

SEQ ID NO: 4131 - RNA, 21 nt, synthetic construct
  source 1..21: mol_type = other RNA
aaataaaaaataaataaataa

SEQ ID NO: 4132 - RNA, 21 nt, synthetic construct
  source 1..21: mol_type = other RNA
aaaaaaaaataaatatatata

SEQ ID NO: 4133 - RNA, 21 nt, synthetic construct
  source 1..21: mol_type = other RNA
aaataaaaaaaaaaaaataaa

SEQ ID NO: 4134 - RNA, 21 nt, synthetic construct
  source 1..21: mol_type = other RNA
aaaaataaataaatatatata

SEQ ID NO: 4135 - RNA, 21 nt, synthetic construct
  source 1..21: mol_type = other RNA
aaataaaaaaaaataaataaa

SEQ ID NO: 4136 - RNA, 21 nt, synthetic construct
  source 1..21: mol_type = other RNA
aaataaataaaaaaaaataaa

SEQ ID NO: 4137 - RNA, 21 nt, synthetic construct
  source 1..21: mol_type = other RNA
aaaaaaaaaaaatataaatat

SEQ ID NO: 4138 - RNA, 21 nt, synthetic construct
  source 1..21: mol_type = other RNA
aaataaataaaaataaataaa

SEQ ID NO: 4139 - RNA, 21 nt, synthetic construct
  source 1..21: mol_type = other RNA
aaataaaaataaataaataaa

SEQ ID NO: 4140 - RNA, 21 nt, synthetic construct
  source 1..21: mol_type = other RNA
aaataaataaataaaaataaa

SEQ ID NO: 4141 - RNA, 21 nt, synthetic construct
  source 1..21: mol_type = other RNA
aaaaaaaataaatataaatat

SEQ ID NO: 4142 - RNA, 21 nt, synthetic construct
  source 1..21: mol_type = other RNA
aaaaaaaatataaataaatat

SEQ ID NO: 4143 - RNA, 21 nt, synthetic construct
  source 1..21: mol_type = other RNA
aaaataaataaatataaatat

SEQ ID NO: 4144 - RNA, 21 nt, synthetic construct
  source 1..21: mol_type = other RNA
aaaatataaataaataaatat

SEQ ID NO: 4145 - RNA, 21 nt, synthetic construct
  source 1..21: mol_type = other RNA
aaaataaatataaataaatat

SEQ ID NO: 4146 - RNA, 21 nt, synthetic construct
  source 1..21: mol_type = other RNA
aaataaataaatatataaata

SEQ ID NO: 4147 - RNA, 21 nt, synthetic construct
  source 1..21: mol_type = other RNA
aaatatataaataaataaata

SEQ ID NO: 4148 - RNA, 21 nt, synthetic construct
  source 1..21: mol_type = other RNA
aaataaatatataaataaata

SEQ ID NO: 4149 - RNA, 21 nt, synthetic construct
  source 1..21: mol_type = other RNA
aaaaaaaaaaaaaaaaataat

SEQ ID NO: 4150 - RNA, 21 nt, synthetic construct
  source 1..21: mol_type = other RNA
aaataaaaaaaaaaaaaatat

SEQ ID NO: 4151 - RNA, 21 nt, synthetic construct
  source 1..21: mol_type = other RNA
aaaaaaaaaaaaataaataat

SEQ ID NO: 4152 - RNA, 21 nt, synthetic construct
  source 1..21: mol_type = other RNA
aaataaataaaaaaaaaatat

SEQ ID NO: 4153 - RNA, 21 nt, synthetic construct
  source 1..21: mol_type = other RNA
aaataaaaaaaaaataaatat

SEQ ID NO: 4154 - RNA, 21 nt, synthetic construct
  source 1..21: mol_type = other RNA
aaaaaaaaataaataaataat

SEQ ID NO: 4155 - RNA, 21 nt, synthetic construct
  source 1..21: mol_type = other RNA
aaatataaatataaatataaa

SEQ ID NO: 4156 - RNA, 21 nt, synthetic construct
  source 1..21: mol_type = other RNA
aaataaataaataaaaaatat

SEQ ID NO: 4157 - RNA, 21 nt, synthetic construct
  source 1..21: mol_type = other RNA
aaataaataaaaaataaatat

SEQ ID NO: 4158 - RNA, 21 nt, synthetic construct
  source 1..21: mol_type = other RNA
aaataaaaaataaataaatat

SEQ ID NO: 4159 - RNA, 21 nt, synthetic construct
  source 1..21: mol_type = other RNA
aaaaataaataaataaataat

SEQ ID NO: 4160 - RNA, 21 nt, synthetic construct
  source 1..21: mol_type = other RNA
aaaaaaaataaaaaaaatata

SEQ ID NO: 4161 - RNA, 21 nt, synthetic construct
  source 1..21: mol_type = other RNA
aaaaaaaaataaaaaaatata

SEQ ID NO: 4162 - RNA, 21 nt, synthetic construct
  source 1..21: mol_type = other RNA
aaaaaaaaaataaaaaatata

SEQ ID NO: 4163 - RNA, 21 nt, synthetic construct
  source 1..21: mol_type = other RNA
aaaaaaaaaaataaaaatata

SEQ ID NO: 4164 - RNA, 21 nt, synthetic construct
  source 1..21: mol_type = other RNA
aaaaaaataaaaaaaaatata

SEQ ID NO: 4165 - RNA, 21 nt, synthetic construct
  source 1..21: mol_type = other RNA
aaaataaaaaaaaaaaatata

SEQ ID NO: 4166 - RNA, 21 nt, synthetic construct
  source 1..21: mol_type = other RNA
aaaaataaaaaaaaaaatata

SEQ ID NO: 4167 - RNA, 21 nt, synthetic construct
  source 1..21: mol_type = other RNA
aaaaaaaaaaaataaaatata

SEQ ID NO: 4168 - RNA, 21 nt, synthetic construct
  source 1..21: mol_type = other RNA
aaaaaataaaaaaaaaatata

SEQ ID NO: 4169 - RNA, 21 nt, synthetic construct
  source 1..21: mol_type = other RNA
aaaaaaaaaaaaaaaatatat

SEQ ID NO: 4170 - RNA, 21 nt, synthetic construct
  source 1..21: mol_type = other RNA
aaaataaataaaaaaaatata

SEQ ID NO: 4171 - RNA, 21 nt, synthetic construct
  source 1..21: mol_type = other RNA
aaaaaaaataaataaaatata

SEQ ID NO: 4172 - RNA, 21 nt, synthetic construct
  source 1..21: mol_type = other RNA
aaaaaaataaataaaaatata

SEQ ID NO: 4173 - RNA, 21 nt, synthetic construct
  source 1..21: mol_type = other RNA
aaaaaaaataaaataaatata

SEQ ID NO: 4174 - RNA, 21 nt, synthetic construct
  source 1..21: mol_type = other RNA
aaaaaataaataaaaaatata

SEQ ID NO: 4175 - RNA, 21 nt, synthetic construct
  source 1..21: mol_type = other RNA
aaaataaaaaaaataaatata

SEQ ID NO: 4176 - RNA, 21 nt, synthetic construct
  source 1..21: mol_type = other RNA
aaaaaaataaaaataaatata

SEQ ID NO: 4177 - RNA, 21 nt, synthetic construct
  source 1..21: mol_type = other RNA
aaaaataaaaaaataaatata

SEQ ID NO: 4178 - RNA, 21 nt, synthetic construct
  source 1..21: mol_type = other RNA
aaaaataaataaaaaaatata

SEQ ID NO: 4179 - RNA, 21 nt, synthetic construct
  source 1..21: mol_type = other RNA
aaaaaataaaaaataaatata

SEQ ID NO: 4180 - RNA, 21 nt, synthetic construct
  source 1..21: mol_type = other RNA
aaaaaaaaaaaaaaaaaaaaa

SEQ ID NO: 4181 - RNA, 21 nt, synthetic construct
  source 1..21: mol_type = other RNA
aaaaaaaaaaaataaatatat

SEQ ID NO: 4182 - RNA, 21 nt, synthetic construct
  source 1..21: mol_type = other RNA
aaaataaataaaataaatata

SEQ ID NO: 4183 - RNA, 21 nt, synthetic construct
  source 1..21: mol_type = other RNA
aaaataaataaataaaatata

SEQ ID NO: 4184 - RNA, 21 nt, synthetic construct
  source 1..21: mol_type = other RNA
aaaataaaataaataaatata

SEQ ID NO: 4185 - RNA, 21 nt, synthetic construct
  source 1..21: mol_type = other RNA
aaaaaaaataaataaatatat

SEQ ID NO: 4186 - RNA, 21 nt, synthetic construct
  source 1..21: mol_type = other RNA
aaaataaataaataaatatat

SEQ ID NO: 4187 - RNA, 21 nt, synthetic construct
  source 1..21: mol_type = other RNA
aaatatataaataaatataaa

SEQ ID NO: 4188 - RNA, 21 nt, synthetic construct
  source 1..21: mol_type = other RNA
aaatataaataaatatataaa

SEQ ID NO: 4189 - RNA, 21 nt, synthetic construct
  source 1..21: mol_type = other RNA
aaataaatataaatatataaa

SEQ ID NO: 4190 - RNA, 21 nt, synthetic construct
  source 1..21: mol_type = other RNA
aaatataaatatataaataaa

SEQ ID NO: 4191 - RNA, 21 nt, synthetic construct
  source 1..21: mol_type = other RNA
aaataaatatataaatataaa

SEQ ID NO: 4192 - RNA, 21 nt, synthetic construct
  source 1..21: mol_type = other RNA
aaatatataaatataaataaa

SEQ ID NO: 4193 - RNA, 21 nt, synthetic construct
  source 1..21: mol_type = other RNA
ataaataaataaataaataaa

SEQ ID NO: 4194 - RNA, 21 nt, synthetic construct
  source 1..21: mol_type = other RNA
aaaaaaaaaaaaatataaata

SEQ ID NO: 4195 - RNA, 21 nt, synthetic construct
  source 1..21: mol_type = other RNA
aaaaaaaaatataaataaata

SEQ ID NO: 4196 - RNA, 21 nt, synthetic construct
  source 1..21: mol_type = other RNA
aaaaaaaaataaatataaata

SEQ ID NO: 4197 - RNA, 21 nt, synthetic construct
  source 1..21: mol_type = other RNA
aaaaataaataaatataaata

SEQ ID NO: 4198 - RNA, 21 nt, synthetic construct
  source 1..21: mol_type = other RNA
aaaaatataaataaataaata

SEQ ID NO: 4199 - RNA, 21 nt, synthetic construct
  source 1..21: mol_type = other RNA
aaaaataaatataaataaata

SEQ ID NO: 4200 - RNA, 21 nt, synthetic construct
  source 1..21: mol_type = other RNA
aaataaaaaaaaaaaaaaata

SEQ ID NO: 4201 - RNA, 21 nt, synthetic construct
  source 1..21: mol_type = other RNA
aaataaataaataataaataa

SEQ ID NO: 4202 - RNA, 21 nt, synthetic construct
  source 1..21: mol_type = other RNA
aaataaataaataaataataa

SEQ ID NO: 4203 - RNA, 21 nt, synthetic construct
  source 1..21: mol_type = other RNA
aaataataaataaataaataa

SEQ ID NO: 4204 - RNA, 21 nt, synthetic construct
  source 1..21: mol_type = other RNA
aaataaataataaataaataa

SEQ ID NO: 4205 - RNA, 21 nt, synthetic construct
  source 1..21: mol_type = other RNA
aaatataaatataaaaatata

SEQ ID NO: 4206 - RNA, 21 nt, synthetic construct
  source 1..21: mol_type = other RNA
aaatataaaaatataaatata

SEQ ID NO: 4207 - RNA, 21 nt, synthetic construct
  source 1..21: mol_type = other RNA
aaataaaaaaaaaaataaata

SEQ ID NO: 4208 - RNA, 21 nt, synthetic construct
  source 1..21: mol_type = other RNA
aaataaataaaaaaaaaaata

SEQ ID NO: 4209 - RNA, 21 nt, synthetic construct
  source 1..21: mol_type = other RNA
aaataaataaaaaaataaata

SEQ ID NO: 4210 - RNA, 21 nt, synthetic construct
  source 1..21: mol_type = other RNA
aaataaataaataaaaaaata

SEQ ID NO: 4211 - RNA, 21 nt, synthetic construct
  source 1..21: mol_type = other RNA
aaataaaaaaataaataaata

SEQ ID NO: 4212 - RNA, 21 nt, synthetic construct
  source 1..21: mol_type = other RNA
aaatatatataaataaataaa

SEQ ID NO: 4213 - RNA, 21 nt, synthetic construct
  source 1..21: mol_type = other RNA
aaataaatatatataaataaa

SEQ ID NO: 4214 - RNA, 21 nt, synthetic construct
  source 1..21: mol_type = other RNA
aaataaataaatatatataaa

SEQ ID NO: 4215 - RNA, 21 nt, synthetic construct
  source 1..21: mol_type = other RNA
aaaaaaaaaatataaatataa

SEQ ID NO: 4216 - RNA, 21 nt, synthetic construct
  source 1..21: mol_type = other RNA
aaatataaataaataaatatt

SEQ ID NO: 4217 - RNA, 21 nt, synthetic construct
  source 1..21: mol_type = other RNA
aaataaataaatataaatatt

SEQ ID NO: 4218 - RNA, 21 nt, synthetic construct
  source 1..21: mol_type = other RNA
aaataaatataaataaatatt

SEQ ID NO: 4219 - RNA, 21 nt, synthetic construct
  source 1..21: mol_type = other RNA
aaaaaatataaataaatataa

SEQ ID NO: 4220 - RNA, 21 nt, synthetic construct
  source 1..21: mol_type = other RNA
aaaaaatataaatataaataa

SEQ ID NO: 4221 - RNA, 21 nt, synthetic construct
  source 1..21: mol_type = other RNA
aaaaaataaatataaatataa

SEQ ID NO: 4222 - RNA, 21 nt, synthetic construct
  source 1..21: mol_type = other RNA
atataaatataaataaatata

SEQ ID NO: 4223 - RNA, 21 nt, synthetic construct
  source 1..21: mol_type = other RNA
atataaataaatataaatata

SEQ ID NO: 4224 - RNA, 21 nt, synthetic construct
  source 1..21: mol_type = other RNA
aaaaaaaaatataaatataaa

SEQ ID NO: 4225 - RNA, 21 nt, synthetic construct
  source 1..21: mol_type = other RNA
aaatataaaaaaaaatatata

SEQ ID NO: 4226 - RNA, 21 nt, synthetic construct
  source 1..21: mol_type = other RNA
aaatatataaaaaaaaatata

SEQ ID NO: 4227 - RNA, 21 nt, synthetic construct
  source 1..21: mol_type = other RNA
aaaaatataaataaatataaa

SEQ ID NO: 4228 - RNA, 21 nt, synthetic construct
  source 1..21: mol_type = other RNA
aaaaataaatataaatataaa

SEQ ID NO: 4229 - RNA, 21 nt, synthetic construct
  source 1..21: mol_type = other RNA
aaataaatatataaaaatata

SEQ ID NO: 4230 - RNA, 21 nt, synthetic construct
  source 1..21: mol_type = other RNA
aaaaatataaatataaataaa

SEQ ID NO: 4231 - RNA, 21 nt, synthetic construct
  source 1..21: mol_type = other RNA
aaatatataaataaaaatata

SEQ ID NO: 4232 - RNA, 21 nt, synthetic construct
  source 1..21: mol_type = other RNA
aaatataaataaaaatatata

SEQ ID NO: 4233 - RNA, 21 nt, synthetic construct
  source 1..21: mol_type = other RNA
aaataaaaatataaatatata

SEQ ID NO: 4234 - RNA, 21 nt, synthetic construct
  source 1..21: mol_type = other RNA
aaatatataaaaataaatata

SEQ ID NO: 4235 - RNA, 21 nt, synthetic construct
  source 1..21: mol_type = other RNA
aaataaaaatatataaatata

SEQ ID NO: 4236 - RNA, 21 nt, synthetic construct
  source 1..21: mol_type = other RNA
aaatataaaaataaatatata

SEQ ID NO: 4237 - RNA, 21 nt, synthetic construct
  source 1..21: mol_type = other RNA
aaataaatataaaaatatata

SEQ ID NO: 4238 - RNA, 22 nt, synthetic construct
  source 1..22: mol_type = other RNA
aaataaataaataaataaataa

SEQ ID NO: 4239 - RNA, 22 nt, synthetic construct
  source 1..22: mol_type = other RNA
aaaaaaaaaaaaaaaaaatata

SEQ ID NO: 4240 - RNA, 22 nt, synthetic construct
  source 1..22: mol_type = other RNA
aaaaaaaaaaaaaataaatata

SEQ ID NO: 4241 - RNA, 22 nt, synthetic construct
  source 1..22: mol_type = other RNA
aaataaataaataaataaatat

SEQ ID NO: 4242 - RNA, 22 nt, synthetic construct
  source 1..22: mol_type = other RNA
aaaaaaaaaataaataaatata

SEQ ID NO: 4243 - RNA, 22 nt, synthetic construct
  source 1..22: mol_type = other RNA
aaaaaataaataaataaatata

SEQ ID NO: 4244 - RNA, 22 nt, synthetic construct
  source 1..22: mol_type = other RNA
aataaataaataaataaatata

SEQ ID NO: 4245 - RNA, 22 nt, synthetic construct
  source 1..22: mol_type = other RNA
aaaaaaaaaaaatataaatata

SEQ ID NO: 4246 - RNA, 22 nt, synthetic construct
  source 1..22: mol_type = other RNA
aaaaaaaatataaataaatata

SEQ ID NO: 4247 - RNA, 22 nt, synthetic construct
  source 1..22: mol_type = other RNA
aaaaaaaataaatataaatata

SEQ ID NO: 4248 - RNA, 22 nt, synthetic construct
  source 1..22: mol_type = other RNA
aaaataaatataaataaatata

SEQ ID NO: 4249 - RNA, 22 nt, synthetic construct
  source 1..22: mol_type = other RNA
aaaatataaataaataaatata

SEQ ID NO: 4250 - RNA, 22 nt, synthetic construct
  source 1..22: mol_type = other RNA
aaaataaataaatataaatata

SEQ ID NO: 4251 - RNA, 22 nt, synthetic construct
  source 1..22: mol_type = other RNA
aaataaaaaaaaaaaaaatata

SEQ ID NO: 4252 - RNA, 22 nt, synthetic construct
  source 1..22: mol_type = other RNA
aaataaataaaaaaaaaatata

SEQ ID NO: 4253 - RNA, 22 nt, synthetic construct
  source 1..22: mol_type = other RNA
aaataaaaaaaaaataaatata

SEQ ID NO: 4254 - RNA, 22 nt, synthetic construct
  source 1..22: mol_type = other RNA
aaataaaaaataaataaatata

SEQ ID NO: 4255 - RNA, 22 nt, synthetic construct
  source 1..22: mol_type = other RNA
aaataaataaaaaataaatata

SEQ ID NO: 4256 - RNA, 22 nt, synthetic construct
  source 1..22: mol_type = other RNA
aaataaataaataaaaaatata

SEQ ID NO: 4257 - RNA, 22 nt, synthetic construct
  source 1..22: mol_type = other RNA
aaaaaaaaaaaaaaaatatata

SEQ ID NO: 4258 - RNA, 22 nt, synthetic construct
  source 1..22: mol_type = other RNA
aaaaaaaaaaaataaatatata

SEQ ID NO: 4259 - RNA, 22 nt, synthetic construct
  source 1..22: mol_type = other RNA
aaaaaaaaaaaaaaaaaaataa

SEQ ID NO: 4260 - RNA, 22 nt, synthetic construct
  source 1..22: mol_type = other RNA
aaaaaaaataaataaatatata

SEQ ID NO: 4261 - RNA, 22 nt, synthetic construct
  source 1..22: mol_type = other RNA
aaaaaaaaaaaaaaataaataa

SEQ ID NO: 4262 - RNA, 22 nt, synthetic construct
  source 1..22: mol_type = other RNA
aaaataaataaataaatatata

SEQ ID NO: 4263 - RNA, 22 nt, synthetic construct
  source 1..22: mol_type = other RNA
aaaaaaaaaaataaataaataa

SEQ ID NO: 4264 - RNA, 22 nt, synthetic construct
  source 1..22: mol_type = other RNA
aaaaaaaaaaaaaaaaaataaa

SEQ ID NO: 4265 - RNA, 22 nt, synthetic construct
  source 1..22: mol_type = other RNA
aaaaaaataaataaataaataa

SEQ ID NO: 4266 - RNA, 22 nt, synthetic construct
  source 1..22: mol_type = other RNA
aaaaaaaaaaaaaataaataaa

SEQ ID NO: 4267 - RNA, 22 nt, synthetic construct
  source 1..22: mol_type = other RNA
aaaaaaaaaataaataaataaa

SEQ ID NO: 4268 - RNA, 22 nt, synthetic construct
  source 1..22: mol_type = other RNA
aaaaaataaataaataaataaa

SEQ ID NO: 4269 - RNA, 22 nt, synthetic construct
  source 1..22: mol_type = other RNA
aaaaaaaaaaaaaaaaaaatat

SEQ ID NO: 4270 - RNA, 22 nt, synthetic construct
  source 1..22: mol_type = other RNA
aaaaaaaaaaaaaaataaatat

SEQ ID NO: 4271 - RNA, 22 nt, synthetic construct
  source 1..22: mol_type = other RNA
aaaaaaaaaaataaataaatat

SEQ ID NO: 4272 - RNA, 22 nt, synthetic construct
  source 1..22: mol_type = other RNA
aaaaaaataaataaataaatat

SEQ ID NO: 4273 - RNA, 22 nt, synthetic construct
  source 1..22: mol_type = other RNA
aaataaatataaataaatataa

SEQ ID NO: 4274 - RNA, 22 nt, synthetic construct
  source 1..22: mol_type = other RNA
aaataaatataaatataaataa

SEQ ID NO: 4275 - RNA, 22 nt, synthetic construct
  source 1..22: mol_type = other RNA
aaataaataaatataaatataa

SEQ ID NO: 4276 - RNA, 22 nt, synthetic construct
  source 1..22: mol_type = other RNA
aaatataaatataaataaataa

SEQ ID NO: 4277 - RNA, 22 nt, synthetic construct
  source 1..22: mol_type = other RNA
aaatataaataaatataaataa

SEQ ID NO: 4278 - RNA, 22 nt, synthetic construct
  source 1..22: mol_type = other RNA
aaatataaataaataaatataa

SEQ ID NO: 4279 - RNA, 22 nt, synthetic construct
  source 1..22: mol_type = other RNA
aaataaataaataaataatata

SEQ ID NO: 4280 - RNA, 22 nt, synthetic construct
  source 1..22: mol_type = other RNA
aaataataaataaataaatata

SEQ ID NO: 4281 - RNA, 22 nt, synthetic construct
  source 1..22: mol_type = other RNA
aaataaataataaataaatata

SEQ ID NO: 4282 - RNA, 22 nt, synthetic construct
  source 1..22: mol_type = other RNA
aaataaataaataataaatata

SEQ ID NO: 4283 - RNA, 22 nt, synthetic construct
  source 1..22: mol_type = other RNA
aaataaataaataaatatataa

SEQ ID NO: 4284 - RNA, 22 nt, synthetic construct
  source 1..22: mol_type = other RNA
aaataaataaatatataaataa

SEQ ID NO: 4285 - RNA, 22 nt, synthetic construct
  source 1..22: mol_type = other RNA
aaataaatatataaataaataa

SEQ ID NO: 4286 - RNA, 22 nt, synthetic construct
  source 1..22: mol_type = other RNA
aaatatataaataaataaataa

SEQ ID NO: 4287 - RNA, 22 nt, synthetic construct
  source 1..22: mol_type = other RNA
aaataaatataaatataaatat

SEQ ID NO: 4288 - RNA, 22 nt, synthetic construct
  source 1..22: mol_type = other RNA
aaatataaatataaataaatat

SEQ ID NO: 4289 - RNA, 22 nt, synthetic construct
  source 1..22: mol_type = other RNA
aaatataaataaatataaatat

SEQ ID NO: 4290 - RNA, 22 nt, synthetic construct
  source 1..22: mol_type = other RNA
aaaaaaaaaaaaaaaaaaaata

SEQ ID NO: 4291 - RNA, 22 nt, synthetic construct
  source 1..22: mol_type = other RNA
aaaaaaaaaaaaaaaataaata

SEQ ID NO: 4292 - RNA, 22 nt, synthetic construct
  source 1..22: mol_type = other RNA
aaaaaatataaatataaatata

SEQ ID NO: 4293 - RNA, 22 nt, synthetic construct
  source 1..22: mol_type = other RNA
aaaaaaaaaaaataaataaata

SEQ ID NO: 4294 - RNA, 22 nt, synthetic construct
  source 1..22: mol_type = other RNA
aaaaaaaataaataaataaata

SEQ ID NO: 4295 - RNA, 22 nt, synthetic construct
  source 1..22: mol_type = other RNA
aaaataaataaataaataaata

SEQ ID NO: 4296 - RNA, 22 nt, synthetic construct
  source 1..22: mol_type = other RNA
aaatataaaaaaaaaaaatata

SEQ ID NO: 4297 - RNA, 22 nt, synthetic construct
  source 1..22: mol_type = other RNA
aaataaaaaaaatataaatata

SEQ ID NO: 4298 - RNA, 22 nt, synthetic construct
  source 1..22: mol_type = other RNA
aaatataaaaaaaataaatata

SEQ ID NO: 4299 - RNA, 22 nt, synthetic construct
  source 1..22: mol_type = other RNA
aaatataaataaaaaaaatata

SEQ ID NO: 4300 - RNA, 22 nt, synthetic construct
  source 1..22: mol_type = other RNA
aaataaatataaaaaaaatata

SEQ ID NO: 4301 - RNA, 22 nt, synthetic construct
  source 1..22: mol_type = other RNA
aaataaataaatataaaatata

SEQ ID NO: 4302 - RNA, 22 nt, synthetic construct
  source 1..22: mol_type = other RNA
aaatataaaataaataaatata

SEQ ID NO: 4303 - RNA, 22 nt, synthetic construct
  source 1..22: mol_type = other RNA
aaatataaataaaataaatata

SEQ ID NO: 4304 - RNA, 22 nt, synthetic construct
  source 1..22: mol_type = other RNA
aaataaaatataaataaatata

SEQ ID NO: 4305 - RNA, 22 nt, synthetic construct
  source 1..22: mol_type = other RNA
aaataaaataaatataaatata

SEQ ID NO: 4306 - RNA, 22 nt, synthetic construct
  source 1..22: mol_type = other RNA
aaataaataaaatataaatata

SEQ ID NO: 4307 - RNA, 22 nt, synthetic construct
  source 1..22: mol_type = other RNA
aaatataaataaataaaatata

SEQ ID NO: 4308 - RNA, 22 nt, synthetic construct
  source 1..22: mol_type = other RNA
aaataaatataaataaaatata

SEQ ID NO: 4309 - RNA, 22 nt, synthetic construct
  source 1..22: mol_type = other RNA
aaataaatataaaataaatata

SEQ ID NO: 4310 - RNA, 22 nt, synthetic construct
  source 1..22: mol_type = other RNA
aaataaatataaataaatatat

SEQ ID NO: 4311 - RNA, 22 nt, synthetic construct
  source 1..22: mol_type = other RNA
aaataaatatataaataaatat

SEQ ID NO: 4312 - RNA, 22 nt, synthetic construct
  source 1..22: mol_type = other RNA
aaataaataaatatataaatat

SEQ ID NO: 4313 - RNA, 22 nt, synthetic construct
  source 1..22: mol_type = other RNA
aaatatataaataaataaatat

SEQ ID NO: 4314 - RNA, 22 nt, synthetic construct
  source 1..22: mol_type = other RNA
aaataaataaatataaatatat

SEQ ID NO: 4315 - RNA, 22 nt, synthetic construct
  source 1..22: mol_type = other RNA
aaatataaataaataaatatat

SEQ ID NO: 4316 - RNA, 22 nt, synthetic construct
  source 1..22: mol_type = other RNA
aaaaaaaaaatataaatatata

SEQ ID NO: 4317 - RNA, 22 nt, synthetic construct
  source 1..22: mol_type = other RNA
aaaaaaaaaatatataaatata

SEQ ID NO: 4318 - RNA, 22 nt, synthetic construct
  source 1..22: mol_type = other RNA
aaaaaaaaaaaaaaaaatataa

SEQ ID NO: 4319 - RNA, 22 nt, synthetic construct
  source 1..22: mol_type = other RNA
aaaaaataaatataaatatata

SEQ ID NO: 4320 - RNA, 22 nt, synthetic construct
  source 1..22: mol_type = other RNA
aaaaaataaatatataaatata

SEQ ID NO: 4321 - RNA, 22 nt, synthetic construct
  source 1..22: mol_type = other RNA
aaaaaatatataaataaatata

SEQ ID NO: 4322 - RNA, 22 nt, synthetic construct
  source 1..22: mol_type = other RNA
aaaaaatataaataaatatata

SEQ ID NO: 4323 - RNA, 22 nt, synthetic construct
  source 1..22: mol_type = other RNA
aataaataaataaataaataaa

SEQ ID NO: 4324 - RNA, 22 nt, synthetic construct
  source 1..22: mol_type = other RNA
aaaaaaaaaaaaataaatataa

SEQ ID NO: 4325 - RNA, 22 nt, synthetic construct
  source 1..22: mol_type = other RNA
aaaaaaaaaaaaatataaataa

SEQ ID NO: 4326 - RNA, 22 nt, synthetic construct
  source 1..22: mol_type = other RNA
aaaaaaaaataaatataaataa

SEQ ID NO: 4327 - RNA, 22 nt, synthetic construct
  source 1..22: mol_type = other RNA
aaaaaaaaatataaataaataa

SEQ ID NO: 4328 - RNA, 22 nt, synthetic construct
  source 1..22: mol_type = other RNA
aaaaaaaaataaataaatataa

SEQ ID NO: 4329 - RNA, 22 nt, synthetic construct
  source 1..22: mol_type = other RNA
aaaaaaaaaaaaaaaatataaa

SEQ ID NO: 4330 - RNA, 22 nt, synthetic construct
  source 1..22: mol_type = other RNA
aaaaataaataaatataaataa

SEQ ID NO: 4331 - RNA, 22 nt, synthetic construct
  source 1..22: mol_type = other RNA
aaaaataaataaataaatataa

SEQ ID NO: 4332 - RNA, 22 nt, synthetic construct
  source 1..22: mol_type = other RNA
aaaaataaatataaataaataa

SEQ ID NO: 4333 - RNA, 22 nt, synthetic construct
  source 1..22: mol_type = other RNA
aaaaatataaataaataaataa

SEQ ID NO: 4334 - RNA, 22 nt, synthetic construct
  source 1..22: mol_type = other RNA
aaaaaaaaaaaatataaataaa

SEQ ID NO: 4335 - RNA, 22 nt, synthetic construct
  source 1..22: mol_type = other RNA
aaaaaaaaaaaataaatataaa

SEQ ID NO: 4336 - RNA, 22 nt, synthetic construct
  source 1..22: mol_type = other RNA
aaataaaaaaaaaaaatatata

SEQ ID NO: 4337 - RNA, 22 nt, synthetic construct
  source 1..22: mol_type = other RNA
aaaaaaaataaatataaataaa

SEQ ID NO: 4338 - RNA, 22 nt, synthetic construct
  source 1..22: mol_type = other RNA
aaaaaaaataaataaatataaa

SEQ ID NO: 4339 - RNA, 22 nt, synthetic construct
  source 1..22: mol_type = other RNA
aaaaaaaatataaataaataaa

SEQ ID NO: 4340 - RNA, 22 nt, synthetic construct
  source 1..22: mol_type = other RNA
aaataaaaaaaataaatatata

SEQ ID NO: 4341 - RNA, 22 nt, synthetic construct
  source 1..22: mol_type = other RNA
aaataaataaaaaaaatatata

SEQ ID NO: 4342 - RNA, 22 nt, synthetic construct
  source 1..22: mol_type = other RNA
aaataaaaaaaaaaaaaaataa

SEQ ID NO: 4343 - RNA, 22 nt, synthetic construct
  source 1..22: mol_type = other RNA
aaaataaatataaataaataaa

SEQ ID NO: 4344 - RNA, 22 nt, synthetic construct
  source 1..22: mol_type = other RNA
aaaataaataaataaatataaa

SEQ ID NO: 4345 - RNA, 22 nt, synthetic construct
  source 1..22: mol_type = other RNA
aaaatataaataaataaataaa

SEQ ID NO: 4346 - RNA, 22 nt, synthetic construct
  source 1..22: mol_type = other RNA
aaaataaataaatataaataaa

SEQ ID NO: 4347 - RNA, 22 nt, synthetic construct
  source 1..22: mol_type = other RNA
aaataaaataaataaatatata

SEQ ID NO: 4348 - RNA, 22 nt, synthetic construct
  source 1..22: mol_type = other RNA
aaataaataaataaaatatata

SEQ ID NO: 4349 - RNA, 22 nt, synthetic construct
  source 1..22: mol_type = other RNA
aaataaataaaataaatatata

SEQ ID NO: 4350 - RNA, 22 nt, synthetic construct
  source 1..22: mol_type = other RNA
aaataaaaaaaaaaataaataa

SEQ ID NO: 4351 - RNA, 22 nt, synthetic construct
  source 1..22: mol_type = other RNA
aaataaataaaaaaaaaaataa

SEQ ID NO: 4352 - RNA, 22 nt, synthetic construct
  source 1..22: mol_type = other RNA
aaaaaaaaaaaaaatatatata

SEQ ID NO: 4353 - RNA, 22 nt, synthetic construct
  source 1..22: mol_type = other RNA
aaataaataaataaatatatat

SEQ ID NO: 4354 - RNA, 22 nt, synthetic construct
  source 1..22: mol_type = other RNA
aaataaataaataaaaaaataa

SEQ ID NO: 4355 - RNA, 22 nt, synthetic construct
  source 1..22: mol_type = other RNA
aaataaaaaaataaataaataa

SEQ ID NO: 4356 - RNA, 22 nt, synthetic construct
  source 1..22: mol_type = other RNA
aaataaataaaaaaataaataa

SEQ ID NO: 4357 - RNA, 22 nt, synthetic construct
  source 1..22: mol_type = other RNA
aaaaaaaaaataaatatatata

SEQ ID NO: 4358 - RNA, 22 nt, synthetic construct
  source 1..22: mol_type = other RNA
aaataaaaaaaaaaaaaataaa

SEQ ID NO: 4359 - RNA, 22 nt, synthetic construct
  source 1..22: mol_type = other RNA
aaaaaataaataaatatatata

SEQ ID NO: 4360 - RNA, 22 nt, synthetic construct
  source 1..22: mol_type = other RNA
aaataaataaaaaaaaaataaa

SEQ ID NO: 4361 - RNA, 22 nt, synthetic construct
  source 1..22: mol_type = other RNA
aaataaaaaaaaaataaataaa

SEQ ID NO: 4362 - RNA, 22 nt, synthetic construct
  source 1..22: mol_type = other RNA
taaataaatataaataaatata

SEQ ID NO: 4363 - RNA, 22 nt, synthetic construct
  source 1..22: mol_type = other RNA
taaataaataaatataaatata

SEQ ID NO: 4364 - RNA, 22 nt, synthetic construct
  source 1..22: mol_type = other RNA
taaatataaataaataaatata

SEQ ID NO: 4365 - RNA, 22 nt, synthetic construct
  source 1..22: mol_type = other RNA
aaaaaaaaaaaaatataaatat

SEQ ID NO: 4366 - RNA, 22 nt, synthetic construct
  source 1..22: mol_type = other RNA
aaataaataaataaaaaataaa

SEQ ID NO: 4367 - RNA, 22 nt, synthetic construct
  source 1..22: mol_type = other RNA
aaataaataaaaaataaataaa

SEQ ID NO: 4368 - RNA, 22 nt, synthetic construct
  source 1..22: mol_type = other RNA
aaataaaaaataaataaataaa

SEQ ID NO: 4369 - RNA, 22 nt, synthetic construct
  source 1..22: mol_type = other RNA
aaaaaaaaataaatataaatat

SEQ ID NO: 4370 - RNA, 22 nt, synthetic construct
  source 1..22: mol_type = other RNA
aaaaaaaaatataaataaatat

SEQ ID NO: 4371 - RNA, 22 nt, synthetic construct
  source 1..22: mol_type = other RNA
aaaaataaatataaataaatat

SEQ ID NO: 4372 - RNA, 22 nt, synthetic construct
  source 1..22: mol_type = other RNA
aaaaatataaataaataaatat

SEQ ID NO: 4373 - RNA, 22 nt, synthetic construct
  source 1..22: mol_type = other RNA
aaaaataaataaatataaatat

SEQ ID NO: 4374 - RNA, 22 nt, synthetic construct
  source 1..22: mol_type = other RNA
aaaaaaaaaaaaaaaaaataat

SEQ ID NO: 4375 - RNA, 22 nt, synthetic construct
  source 1..22: mol_type = other RNA
aaataaaaaaaaaaaaaaatat

SEQ ID NO: 4376 - RNA, 22 nt, synthetic construct
  source 1..22: mol_type = other RNA
aaaaaaaaaaaaaataaataat

SEQ ID NO: 4377 - RNA, 22 nt, synthetic construct
  source 1..22: mol_type = other RNA
aaataaaaaaaaaaataaatat

SEQ ID NO: 4378 - RNA, 22 nt, synthetic construct
  source 1..22: mol_type = other RNA
aaataaataaaaaaaaaaatat

SEQ ID NO: 4379 - RNA, 22 nt, synthetic construct
  source 1..22: mol_type = other RNA
aaaaaaaaaataaataaataat

SEQ ID NO: 4380 - RNA, 22 nt, synthetic construct
  source 1..22: mol_type = other RNA
aaataaataaaaaaataaatat

SEQ ID NO: 4381 - RNA, 22 nt, synthetic construct
  source 1..22: mol_type = other RNA
aaataaataaataaaaaaatat

SEQ ID NO: 4382 - RNA, 22 nt, synthetic construct
  source 1..22: mol_type = other RNA
aaataaaaaaataaataaatat

SEQ ID NO: 4383 - RNA, 22 nt, synthetic construct
  source 1..22: mol_type = other RNA
aaaaaataaataaataaataat

SEQ ID NO: 4384 - RNA, 22 nt, synthetic construct
  source 1..22: mol_type = other RNA
aaaaaaaataaaaaaaaatata

SEQ ID NO: 4385 - RNA, 22 nt, synthetic construct
  source 1..22: mol_type = other RNA
aaaaataaaaaaaaaaaatata

SEQ ID NO: 4386 - RNA, 22 nt, synthetic construct
  source 1..22: mol_type = other RNA
aaaaaaaaaaaaataaaatata

SEQ ID NO: 4387 - RNA, 22 nt, synthetic construct
  source 1..22: mol_type = other RNA
aaaaaaaaaaaataaaaatata

SEQ ID NO: 4388 - RNA, 22 nt, synthetic construct
  source 1..22: mol_type = other RNA
aaaaaaataaaaaaaaaatata

SEQ ID NO: 4389 - RNA, 22 nt, synthetic construct
  source 1..22: mol_type = other RNA
aaaataaaaaaaaaaaaatata

SEQ ID NO: 4390 - RNA, 22 nt, synthetic construct
  source 1..22: mol_type = other RNA
aaaaaaaaaataaaaaaatata

SEQ ID NO: 4391 - RNA, 22 nt, synthetic construct
  source 1..22: mol_type = other RNA
aaaaaataaaaaaaaaaatata

SEQ ID NO: 4392 - RNA, 22 nt, synthetic construct
  source 1..22: mol_type = other RNA
aaaaaaaaaaataaaaaatata

SEQ ID NO: 4393 - RNA, 22 nt, synthetic construct
  source 1..22: mol_type = other RNA
aaaaaaaaataaaaaaaatata

SEQ ID NO: 4394 - RNA, 22 nt, synthetic construct
  source 1..22: mol_type = other RNA
aaaaaaaaaaaaaaaaatatat

SEQ ID NO: 4395 - RNA, 22 nt, synthetic construct
  source 1..22: mol_type = other RNA
taaataaataaataaatatata

SEQ ID NO: 4396 - RNA, 22 nt, synthetic construct
  source 1..22: mol_type = other RNA
aaaaaaaataaataaaaatata

SEQ ID NO: 4397 - RNA, 22 nt, synthetic construct
  source 1..22: mol_type = other RNA
aaaaataaaaaaaataaatata

SEQ ID NO: 4398 - RNA, 22 nt, synthetic construct
  source 1..22: mol_type = other RNA
aaaaaaataaataaaaaatata

SEQ ID NO: 4399 - RNA, 22 nt, synthetic construct
  source 1..22: mol_type = other RNA
aaaataaataaaaaaaaatata

SEQ ID NO: 4400 - RNA, 22 nt, synthetic construct
  source 1..22: mol_type = other RNA
aaaataaaaaaaaataaatata

SEQ ID NO: 4401 - RNA, 22 nt, synthetic construct
  source 1..22: mol_type = other RNA
aaaaaaaataaaaataaatata

SEQ ID NO: 4402 - RNA, 22 nt, synthetic construct
  source 1..22: mol_type = other RNA
aaaaaataaaaaaataaatata

SEQ ID NO: 4403 - RNA, 22 nt, synthetic construct
  source 1..22: mol_type = other RNA
aaaaaaaaataaaataaatata

SEQ ID NO: 4404 - RNA, 22 nt, synthetic construct
  source 1..22: mol_type = other RNA
aaaaaataaataaaaaaatata

SEQ ID NO: 4405 - RNA, 22 nt, synthetic construct
  source 1..22: mol_type = other RNA
aaaaaaataaaaaataaatata

SEQ ID NO: 4406 - RNA, 22 nt, synthetic construct
  source 1..22: mol_type = other RNA
aaaaaaaaataaataaaatata

SEQ ID NO: 4407 - RNA, 22 nt, synthetic construct
  source 1..22: mol_type = other RNA
aaaaataaataaaaaaaatata

SEQ ID NO: 4408 - RNA, 22 nt, synthetic construct
  source 1..22: mol_type = other RNA
aaaaaaaaaaaaaaaaaaaaaa

SEQ ID NO: 4409 - RNA, 22 nt, synthetic construct
  source 1..22: mol_type = other RNA
aaaaaaaaaaaaataaatatat

SEQ ID NO: 4410 - RNA, 22 nt, synthetic construct
  source 1..22: mol_type = other RNA
aaaataaataaaaataaatata

SEQ ID NO: 4411 - RNA, 22 nt, synthetic construct
  source 1..22: mol_type = other RNA
aaaataaaaataaataaatata

SEQ ID NO: 4412 - RNA, 22 nt, synthetic construct
  source 1..22: mol_type = other RNA
aaaaataaataaaataaatata

SEQ ID NO: 4413 - RNA, 22 nt, synthetic construct
  source 1..22: mol_type = other RNA
aaaaataaaataaataaatata

SEQ ID NO: 4414 - RNA, 22 nt, synthetic construct
  source 1..22: mol_type = other RNA
aaaaataaataaataaaatata

SEQ ID NO: 4415 - RNA, 22 nt, synthetic construct
  source 1..22: mol_type = other RNA
aaaataaataaataaaaatata

SEQ ID NO: 4416 - RNA, 22 nt, synthetic construct
  source 1..22: mol_type = other RNA
aaaaaaaaataaataaatatat

SEQ ID NO: 4417 - RNA, 22 nt, synthetic construct
  source 1..22: mol_type = other RNA
aatataaatataaataaatata

SEQ ID NO: 4418 - RNA, 22 nt, synthetic construct
  source 1..22: mol_type = other RNA
aatataaataaatataaatata

SEQ ID NO: 4419 - RNA, 22 nt, synthetic construct
  source 1..22: mol_type = other RNA
aataaatataaatataaatata

SEQ ID NO: 4420 - RNA, 22 nt, synthetic construct
  source 1..22: mol_type = other RNA
aaaaataaataaataaatatat

SEQ ID NO: 4421 - RNA, 22 nt, synthetic construct
  source 1..22: mol_type = other RNA
aaataaataaataaataaatac

SEQ ID NO: 4422 - RNA, 22 nt, synthetic construct
  source 1..22: mol_type = other RNA
aaaaaaaaaaaaaatataaata

SEQ ID NO: 4423 - RNA, 22 nt, synthetic construct
  source 1..22: mol_type = other RNA
aaaaaaaaaataaatataaata

SEQ ID NO: 4424 - RNA, 22 nt, synthetic construct
  source 1..22: mol_type = other RNA
aaaaaaaaaatataaataaata

SEQ ID NO: 4425 - RNA, 22 nt, synthetic construct
  source 1..22: mol_type = other RNA
aaaaaataaatataaataaata

SEQ ID NO: 4426 - RNA, 22 nt, synthetic construct
  source 1..22: mol_type = other RNA
aaaaaataaataaatataaata

SEQ ID NO: 4427 - RNA, 22 nt, synthetic construct
  source 1..22: mol_type = other RNA
aaaaaatataaataaataaata

SEQ ID NO: 4428 - RNA, 22 nt, synthetic construct
  source 1..22: mol_type = other RNA
aataaatataaataaatatata

SEQ ID NO: 4429 - RNA, 22 nt, synthetic construct
  source 1..22: mol_type = other RNA
aatataaataaataaatatata

SEQ ID NO: 4430 - RNA, 22 nt, synthetic construct
  source 1..22: mol_type = other RNA
aataaataaatatataaatata

SEQ ID NO: 4431 - RNA, 22 nt, synthetic construct
  source 1..22: mol_type = other RNA
aataaataaatataaatatata

SEQ ID NO: 4432 - RNA, 22 nt, synthetic construct
  source 1..22: mol_type = other RNA
aatatataaataaataaatata

SEQ ID NO: 4433 - RNA, 22 nt, synthetic construct
  source 1..22: mol_type = other RNA
aaataaaaaaaaaaaaaaaata

SEQ ID NO: 4434 - RNA, 22 nt, synthetic construct
  source 1..22: mol_type = other RNA
aaatataaaaaatataaatata

SEQ ID NO: 4435 - RNA, 22 nt, synthetic construct
  source 1..22: mol_type = other RNA
aaatataaatataaaaaatata

SEQ ID NO: 4436 - RNA, 22 nt, synthetic construct
  source 1..22: mol_type = other RNA
aaataaaaaaaaaaaataaata

SEQ ID NO: 4437 - RNA, 22 nt, synthetic construct
  source 1..22: mol_type = other RNA
aaataaataaaaaaaaaaaata

SEQ ID NO: 4438 - RNA, 23 nt, synthetic construct
  source 1..23: mol_type = other RNA
aaataaataaataaataaatata

SEQ ID NO: 4439 - RNA, 23 nt, synthetic construct
  source 1..23: mol_type = other RNA
aaataaataaataaataaataaa

SEQ ID NO: 4440 - RNA, 23 nt, synthetic construct
  source 1..23: mol_type = other RNA
aaaaaaaaaaaaaaaaaaatata

SEQ ID NO: 4441 - RNA, 23 nt, synthetic construct
  source 1..23: mol_type = other RNA
aaaaaaaaaaaaaaataaatata

SEQ ID NO: 4442 - RNA, 23 nt, synthetic construct
  source 1..23: mol_type = other RNA
aaaaaaaaaaataaataaatata

SEQ ID NO: 4443 - RNA, 23 nt, synthetic construct
  source 1..23: mol_type = other RNA
aaaaaaataaataaataaatata

SEQ ID NO: 4444 - RNA, 23 nt, synthetic construct
  source 1..23: mol_type = other RNA
aaatataaatataaataaatata

SEQ ID NO: 4445 - RNA, 23 nt, synthetic construct
  source 1..23: mol_type = other RNA
aaatataaataaatataaatata

SEQ ID NO: 4446 - RNA, 23 nt, synthetic construct
  source 1..23: mol_type = other RNA
aaataaatataaatataaatata

SEQ ID NO: 4447 - RNA, 23 nt, synthetic construct
  source 1..23: mol_type = other RNA
aaatatataaataaataaatata

SEQ ID NO: 4448 - RNA, 23 nt, synthetic construct
  source 1..23: mol_type = other RNA
aaatataaataaataaatatata

SEQ ID NO: 4449 - RNA, 23 nt, synthetic construct
  source 1..23: mol_type = other RNA
aaataaatatataaataaatata

SEQ ID NO: 4450 - RNA, 23 nt, synthetic construct
  source 1..23: mol_type = other RNA
aaataaataaatatataaatata

SEQ ID NO: 4451 - RNA, 23 nt, synthetic construct
  source 1..23: mol_type = other RNA
aaataaataaatataaatatata

SEQ ID NO: 4452 - RNA, 23 nt, synthetic construct
  source 1..23: mol_type = other RNA
aaataaatataaataaatatata

SEQ ID NO: 4453 - RNA, 23 nt, synthetic construct
  source 1..23: mol_type = other RNA
aaataaataaataaatatatata

SEQ ID NO: 4454 - RNA, 23 nt, synthetic construct
  source 1..23: mol_type = other RNA
aaaaaaaaaaaaatataaatata

SEQ ID NO: 4455 - RNA, 23 nt, synthetic construct
  source 1..23: mol_type = other RNA
aaaaaaaaataaatataaatata

SEQ ID NO: 4456 - RNA, 23 nt, synthetic construct
  source 1..23: mol_type = other RNA
aaaaaaaaatataaataaatata

SEQ ID NO: 4457 - RNA, 23 nt, synthetic construct
  source 1..23: mol_type = other RNA
aaaaataaatataaataaatata

SEQ ID NO: 4458 - RNA, 23 nt, synthetic construct
  source 1..23: mol_type = other RNA
aaaaatataaataaataaatata

SEQ ID NO: 4459 - RNA, 23 nt, synthetic construct
  source 1..23: mol_type = other RNA
aaaaataaataaatataaatata

SEQ ID NO: 4460 - RNA, 23 nt, synthetic construct
  source 1..23: mol_type = other RNA
aaataaaaaaaaaaaaaaatata

SEQ ID NO: 4461 - RNA, 23 nt, synthetic construct
  source 1..23: mol_type = other RNA
aaataaataaataaataaataat

SEQ ID NO: 4462 - RNA, 23 nt, synthetic construct
  source 1..23: mol_type = other RNA
aaataaaaaaaaaaataaatata

SEQ ID NO: 4463 - RNA, 23 nt, synthetic construct
  source 1..23: mol_type = other RNA
aaataaataaaaaaaaaaatata

SEQ ID NO: 4464 - RNA, 23 nt, synthetic construct
  source 1..23: mol_type = other RNA
aaataaaaaaataaataaatata

SEQ ID NO: 4465 - RNA, 23 nt, synthetic construct
  source 1..23: mol_type = other RNA
aaataaataaataaaaaaatata

SEQ ID NO: 4466 - RNA, 23 nt, synthetic construct
  source 1..23: mol_type = other RNA
aaataaataaaaaaataaatata

SEQ ID NO: 4467 - RNA, 23 nt, synthetic construct
  source 1..23: mol_type = other RNA
aaaaaaaaaaaaaaaaatatata

SEQ ID NO: 4468 - RNA, 23 nt, synthetic construct
  source 1..23: mol_type = other RNA
aaaaaaaaaaaaataaatatata

SEQ ID NO: 4469 - RNA, 23 nt, synthetic construct
  source 1..23: mol_type = other RNA
aaaaaaaaaaaaaaaaaaaataa

SEQ ID NO: 4470 - RNA, 23 nt, synthetic construct
  source 1..23: mol_type = other RNA
aaaaaaaaataaataaatatata

SEQ ID NO: 4471 - RNA, 23 nt, synthetic construct
  source 1..23: mol_type = other RNA
aaaaaaaaaaaaaaaataaataa

SEQ ID NO: 4472 - RNA, 23 nt, synthetic construct
  source 1..23: mol_type = other RNA
aaaaataaataaataaatatata

SEQ ID NO: 4473 - RNA, 23 nt, synthetic construct
  source 1..23: mol_type = other RNA
aaaaaaaaaaaataaataaataa

SEQ ID NO: 4474 - RNA, 23 nt, synthetic construct
  source 1..23: mol_type = other RNA
aaaaaaaaaaaaaaaaaaataaa

SEQ ID NO: 4475 - RNA, 23 nt, synthetic construct
  source 1..23: mol_type = other RNA
aaaaaaaataaataaataaataa

SEQ ID NO: 4476 - RNA, 23 nt, synthetic construct
  source 1..23: mol_type = other RNA
aaaaaaaaaaaaaaataaataaa

SEQ ID NO: 4477 - RNA, 23 nt, synthetic construct
  source 1..23: mol_type = other RNA
aaaataaataaataaataaataa

SEQ ID NO: 4478 - RNA, 23 nt, synthetic construct
  source 1..23: mol_type = other RNA
aaaaaaaaaaataaataaataaa

SEQ ID NO: 4479 - RNA, 23 nt, synthetic construct
  source 1..23: mol_type = other RNA
aaaaaaataaataaataaataaa

SEQ ID NO: 4480 - RNA, 23 nt, synthetic construct
  source 1..23: mol_type = other RNA
aaatataaataaataaataaata

SEQ ID NO: 4481 - RNA, 23 nt, synthetic construct
  source 1..23: mol_type = other RNA
aaataaataaatataaataaata

SEQ ID NO: 4482 - RNA, 23 nt, synthetic construct
  source 1..23: mol_type = other RNA
aaataaataaataaatataaata

SEQ ID NO: 4483 - RNA, 23 nt, synthetic construct
  source 1..23: mol_type = other RNA
aaataaatataaataaataaata

SEQ ID NO: 4484 - RNA, 23 nt, synthetic construct
  source 1..23: mol_type = other RNA
aaaaaaaaaaaaaaaaaaaatat

SEQ ID NO: 4485 - RNA, 23 nt, synthetic construct
  source 1..23: mol_type = other RNA
aaaaaaaaaaaaaaaataaatat

SEQ ID NO: 4486 - RNA, 23 nt, synthetic construct
  source 1..23: mol_type = other RNA
aaaaaaaaaaaataaataaatat

SEQ ID NO: 4487 - RNA, 23 nt, synthetic construct
  source 1..23: mol_type = other RNA
aaaaaaaataaataaataaatat

SEQ ID NO: 4488 - RNA, 23 nt, synthetic construct
  source 1..23: mol_type = other RNA
aaaataaataaataaataaatat

SEQ ID NO: 4489 - RNA, 23 nt, synthetic construct
  source 1..23: mol_type = other RNA
aaatataaataaatataaataaa

SEQ ID NO: 4490 - RNA, 23 nt, synthetic construct
  source 1..23: mol_type = other RNA
aaatataaatataaataaataaa

SEQ ID NO: 4491 - RNA, 23 nt, synthetic construct
  source 1..23: mol_type = other RNA
aaataaatataaatataaataaa

SEQ ID NO: 4492 - RNA, 23 nt, synthetic construct
  source 1..23: mol_type = other RNA
aaatataaataaataaatataaa

SEQ ID NO: 4493 - RNA, 23 nt, synthetic construct
  source 1..23: mol_type = other RNA
aaataaataaatataaatataaa

SEQ ID NO: 4494 - RNA, 23 nt, synthetic construct
  source 1..23: mol_type = other RNA
aaataaatataaataaatataaa

SEQ ID NO: 4495 - RNA, 23 nt, synthetic construct
  source 1..23: mol_type = other RNA
aaaaaaaaaaaaaaaaaaaaata

SEQ ID NO: 4496 - RNA, 23 nt, synthetic construct
  source 1..23: mol_type = other RNA
aaaaaaaaaaaaaaaaataaata

SEQ ID NO: 4497 - RNA, 23 nt, synthetic construct
  source 1..23: mol_type = other RNA
aaaaaaatataaatataaatata

SEQ ID NO: 4498 - RNA, 23 nt, synthetic construct
  source 1..23: mol_type = other RNA
aaataaataaataaatatataaa

SEQ ID NO: 4499 - RNA, 23 nt, synthetic construct
  source 1..23: mol_type = other RNA
aaataaataaatatataaataaa

SEQ ID NO: 4500 - RNA, 23 nt, synthetic construct
  source 1..23: mol_type = other RNA
aaataaatatataaataaataaa

SEQ ID NO: 4501 - RNA, 23 nt, synthetic construct
  source 1..23: mol_type = other RNA
aaatatataaataaataaataaa

SEQ ID NO: 4502 - RNA, 23 nt, synthetic construct
  source 1..23: mol_type = other RNA
aaaaaaaaaaaaataaataaata

SEQ ID NO: 4503 - RNA, 23 nt, synthetic construct
  source 1..23: mol_type = other RNA
aaaaaaaaataaataaataaata

SEQ ID NO: 4504 - RNA, 23 nt, synthetic construct
  source 1..23: mol_type = other RNA
aaaaataaataaataaataaata

SEQ ID NO: 4505 - RNA, 23 nt, synthetic construct
  source 1..23: mol_type = other RNA
aaatataaaaaaaaaaaaatata

SEQ ID NO: 4506 - RNA, 23 nt, synthetic construct
  source 1..23: mol_type = other RNA
aaataaaaaaaaatataaatata

SEQ ID NO: 4507 - RNA, 23 nt, synthetic construct
  source 1..23: mol_type = other RNA
aaatataaaaaaaaataaatata

SEQ ID NO: 4508 - RNA, 23 nt, synthetic construct
  source 1..23: mol_type = other RNA
aaatataaataaaaaaaaatata

SEQ ID NO: 4509 - RNA, 23 nt, synthetic construct
  source 1..23: mol_type = other RNA
aaataaatataaaaaaaaatata

SEQ ID NO: 4510 - RNA, 23 nt, synthetic construct
  source 1..23: mol_type = other RNA
aaatataaaaataaataaatata

SEQ ID NO: 4511 - RNA, 23 nt, synthetic construct
  source 1..23: mol_type = other RNA
aaataaaaataaatataaatata

SEQ ID NO: 4512 - RNA, 23 nt, synthetic construct
  source 1..23: mol_type = other RNA
aaatataaataaataaaaatata

SEQ ID NO: 4513 - RNA, 23 nt, synthetic construct
  source 1..23: mol_type = other RNA
aaataaaaatataaataaatata

SEQ ID NO: 4514 - RNA, 23 nt, synthetic construct
  source 1..23: mol_type = other RNA
aaataaatataaaaataaatata

SEQ ID NO: 4515 - RNA, 23 nt, synthetic construct
  source 1..23: mol_type = other RNA
aaatataaataaaaataaatata

SEQ ID NO: 4516 - RNA, 23 nt, synthetic construct
  source 1..23: mol_type = other RNA
aaataaataaaaatataaatata

SEQ ID NO: 4517 - RNA, 23 nt, synthetic construct
  source 1..23: mol_type = other RNA
aaataaatataaataaaaatata

SEQ ID NO: 4518 - RNA, 23 nt, synthetic construct
  source 1..23: mol_type = other RNA
aaataaataaatataaaaatata

SEQ ID NO: 4519 - RNA, 23 nt, synthetic construct
  source 1..23: mol_type = other RNA
aaaaaaaaaaatataaatatata

SEQ ID NO: 4520 - RNA, 23 nt, synthetic construct
  source 1..23: mol_type = other RNA
aaaaaaaaaaatatataaatata

SEQ ID NO: 4521 - RNA, 23 nt, synthetic construct
  source 1..23: mol_type = other RNA
aaaaaaaaaaaaaaaaaatataa

SEQ ID NO: 4522 - RNA, 23 nt, synthetic construct
  source 1..23: mol_type = other RNA
aaaaaaataaatatataaatata

SEQ ID NO: 4523 - RNA, 23 nt, synthetic construct
  source 1..23: mol_type = other RNA
aaaaaaatatataaataaatata

SEQ ID NO: 4524 - RNA, 23 nt, synthetic construct
  source 1..23: mol_type = other RNA
aaaaaaatataaataaatatata

SEQ ID NO: 4525 - RNA, 23 nt, synthetic construct
  source 1..23: mol_type = other RNA
aaaaaaataaatataaatatata

SEQ ID NO: 4526 - RNA, 23 nt, synthetic construct
  source 1..23: mol_type = other RNA
aaaaaaaaaaaaaataaatataa

SEQ ID NO: 4527 - RNA, 23 nt, synthetic construct
  source 1..23: mol_type = other RNA
aaaaaaaaaaaaaatataaataa

SEQ ID NO: 4528 - RNA, 23 nt, synthetic construct
  source 1..23: mol_type = other RNA
aaaaaaaaaatataaataaataa

SEQ ID NO: 4529 - RNA, 23 nt, synthetic construct
  source 1..23: mol_type = other RNA
aaaaaaaaaataaataaatataa

SEQ ID NO: 4530 - RNA, 23 nt, synthetic construct
  source 1..23: mol_type = other RNA
aaaaaaaaaataaatataaataa

SEQ ID NO: 4531 - RNA, 23 nt, synthetic construct
  source 1..23: mol_type = other RNA
aaaaaaaaaaaaaaaaatataaa

SEQ ID NO: 4532 - RNA, 23 nt, synthetic construct
  source 1..23: mol_type = other RNA
aaataaataaataaataaatatt

SEQ ID NO: 4533 - RNA, 23 nt, synthetic construct
  source 1..23: mol_type = other RNA
aaaaaataaataaatataaataa

SEQ ID NO: 4534 - RNA, 23 nt, synthetic construct
  source 1..23: mol_type = other RNA
aaaaaataaataaataaatataa

SEQ ID NO: 4535 - RNA, 23 nt, synthetic construct
  source 1..23: mol_type = other RNA
aaaaaataaatataaataaataa

SEQ ID NO: 4536 - RNA, 23 nt, synthetic construct
  source 1..23: mol_type = other RNA
aaaaaatataaataaataaataa

SEQ ID NO: 4537 - RNA, 23 nt, synthetic construct
  source 1..23: mol_type = other RNA
atataaataaataaataaatata

SEQ ID NO: 4538 - RNA, 23 nt, synthetic construct
  source 1..23: mol_type = other RNA
aaaaaaaaaaaaatataaataaa

SEQ ID NO: 4539 - RNA, 23 nt, synthetic construct
  source 1..23: mol_type = other RNA
aaaaaaaaaaaaataaatataaa

SEQ ID NO: 4540 - RNA, 23 nt, synthetic construct
  source 1..23: mol_type = other RNA
aaataaaaaaaaaaaaatatata

SEQ ID NO: 4541 - RNA, 23 nt, synthetic construct
  source 1..23: mol_type = other RNA
aaaaaaaaatataaataaataaa

SEQ ID NO: 4542 - RNA, 23 nt, synthetic construct
  source 1..23: mol_type = other RNA
aaaaaaaaataaataaatataaa

SEQ ID NO: 4543 - RNA, 23 nt, synthetic construct
  source 1..23: mol_type = other RNA
aaaaaaaaataaatataaataaa

SEQ ID NO: 4544 - RNA, 23 nt, synthetic construct
  source 1..23: mol_type = other RNA
aaataaaaaaaaataaatatata

SEQ ID NO: 4545 - RNA, 23 nt, synthetic construct
  source 1..23: mol_type = other RNA
aaataaataaaaaaaaatatata

SEQ ID NO: 4546 - RNA, 23 nt, synthetic construct
  source 1..23: mol_type = other RNA
aaataaaaaaaaaaaaaaaataa

SEQ ID NO: 4547 - RNA, 23 nt, synthetic construct
  source 1..23: mol_type = other RNA
aaaaataaatataaataaataaa

SEQ ID NO: 4548 - RNA, 23 nt, synthetic construct
  source 1..23: mol_type = other RNA
aaaaatataaataaataaataaa

SEQ ID NO: 4549 - RNA, 23 nt, synthetic construct
  source 1..23: mol_type = other RNA
aaaaataaataaataaatataaa

SEQ ID NO: 4550 - RNA, 23 nt, synthetic construct
  source 1..23: mol_type = other RNA
aaaaataaataaatataaataaa

SEQ ID NO: 4551 - RNA, 23 nt, synthetic construct
  source 1..23: mol_type = other RNA
aaataaataaataaaaatatata

SEQ ID NO: 4552 - RNA, 23 nt, synthetic construct
  source 1..23: mol_type = other RNA
aaataaaaataaataaatatata

SEQ ID NO: 4553 - RNA, 23 nt, synthetic construct
  source 1..23: mol_type = other RNA
aaataaataaaaataaatatata

SEQ ID NO: 4554 - RNA, 23 nt, synthetic construct
  source 1..23: mol_type = other RNA
aaataaaaaaaaaaaataaataa

SEQ ID NO: 4555 - RNA, 23 nt, synthetic construct
  source 1..23: mol_type = other RNA
aaataaataaaaaaaaaaaataa

SEQ ID NO: 4556 - RNA, 23 nt, synthetic construct
  source 1..23: mol_type = other RNA
aaaaaaaaaaaaaaatatatata

SEQ ID NO: 4557 - RNA, 23 nt, synthetic construct
  source 1..23: mol_type = other RNA
aaataaaaaaaataaataaataa

SEQ ID NO: 4558 - RNA, 23 nt, synthetic construct
  source 1..23: mol_type = other RNA
aaataaataaaaaaaataaataa

SEQ ID NO: 4559 - RNA, 23 nt, synthetic construct
  source 1..23: mol_type = other RNA
aaataaataaataaaaaaaataa

SEQ ID NO: 4560 - RNA, 23 nt, synthetic construct
  source 1..23: mol_type = other RNA
aaaaaaaaaaataaatatatata

SEQ ID NO: 4561 - RNA, 23 nt, synthetic construct
  source 1..23: mol_type = other RNA
aaataaaaaaaaaaaaaaataaa

SEQ ID NO: 4562 - RNA, 23 nt, synthetic construct
  source 1..23: mol_type = other RNA
aaataaataaaataaataaataa

SEQ ID NO: 4563 - RNA, 23 nt, synthetic construct
  source 1..23: mol_type = other RNA
aaataaaataaataaataaataa

SEQ ID NO: 4564 - RNA, 23 nt, synthetic construct
  source 1..23: mol_type = other RNA
aaataaataaataaaataaataa

SEQ ID NO: 4565 - RNA, 23 nt, synthetic construct
  source 1..23: mol_type = other RNA
aaataaataaataaataaaataa

SEQ ID NO: 4566 - RNA, 23 nt, synthetic construct
  source 1..23: mol_type = other RNA
aaaaaaataaataaatatatata

SEQ ID NO: 4567 - RNA, 23 nt, synthetic construct
  source 1..23: mol_type = other RNA
aaataaaaaaaaaaataaataaa

SEQ ID NO: 4568 - RNA, 23 nt, synthetic construct
  source 1..23: mol_type = other RNA
aaataaataaaaaaaaaaataaa

SEQ ID NO: 4569 - RNA, 23 nt, synthetic construct
  source 1..23: mol_type = other RNA
aaaaaaaaaaaaaatataaatat

SEQ ID NO: 4570 - RNA, 23 nt, synthetic construct
  source 1..23: mol_type = other RNA
aaataaataaataaaaaaataaa

SEQ ID NO: 4571 - RNA, 23 nt, synthetic construct
  source 1..23: mol_type = other RNA
aaataaaaaaataaataaataaa

SEQ ID NO: 4572 - RNA, 23 nt, synthetic construct
  source 1..23: mol_type = other RNA
aaataaataaaaaaataaataaa

SEQ ID NO: 4573 - RNA, 23 nt, synthetic construct
  source 1..23: mol_type = other RNA
aaaaaaaaaatataaataaatat

SEQ ID NO: 4574 - RNA, 23 nt, synthetic construct
  source 1..23: mol_type = other RNA
aaaaaaaaaataaatataaatat

SEQ ID NO: 4575 - RNA, 23 nt, synthetic construct
  source 1..23: mol_type = other RNA
aaaaaataaatataaataaatat

SEQ ID NO: 4576 - RNA, 23 nt, synthetic construct
  source 1..23: mol_type = other RNA
aaaaaataaataaatataaatat

SEQ ID NO: 4577 - RNA, 23 nt, synthetic construct
  source 1..23: mol_type = other RNA
aaaaaatataaataaataaatat

SEQ ID NO: 4578 - RNA, 23 nt, synthetic construct
  source 1..23: mol_type = other RNA
ataaatataaataaataaatata

SEQ ID NO: 4579 - RNA, 23 nt, synthetic construct
  source 1..23: mol_type = other RNA
ataaataaatataaataaatata

SEQ ID NO: 4580 - RNA, 23 nt, synthetic construct
  source 1..23: mol_type = other RNA
aaaaaaaaaaaaaaaaaaataat

SEQ ID NO: 4581 - RNA, 23 nt, synthetic construct
  source 1..23: mol_type = other RNA
aaataaaaaaaaaaaaaaaatat

SEQ ID NO: 4582 - RNA, 23 nt, synthetic construct
  source 1..23: mol_type = other RNA
aaaaaaaaaaaaaaataaataat

SEQ ID NO: 4583 - RNA, 23 nt, synthetic construct
  source 1..23: mol_type = other RNA
aaataaataaaaaaaaaaaatat

SEQ ID NO: 4584 - RNA, 23 nt, synthetic construct
  source 1..23: mol_type = other RNA
aaataaaaaaaaaaaataaatat

SEQ ID NO: 4585 - RNA, 23 nt, synthetic construct
  source 1..23: mol_type = other RNA
aaaaaaaaaaataaataaataat

SEQ ID NO: 4586 - RNA, 23 nt, synthetic construct
  source 1..23: mol_type = other RNA
aaataaaaaaaataaataaatat

SEQ ID NO: 4587 - RNA, 23 nt, synthetic construct
  source 1..23: mol_type = other RNA
aaataaataaataaaaaaaatat

SEQ ID NO: 4588 - RNA, 23 nt, synthetic construct
  source 1..23: mol_type = other RNA
aaataaataaaaaaaataaatat

SEQ ID NO: 4589 - RNA, 23 nt, synthetic construct
  source 1..23: mol_type = other RNA
aaaaaaataaataaataaataat

SEQ ID NO: 4590 - RNA, 23 nt, synthetic construct
  source 1..23: mol_type = other RNA
aaaaaaaaaaaaataaaaatata

SEQ ID NO: 4591 - RNA, 23 nt, synthetic construct
  source 1..23: mol_type = other RNA
aaaaaaaaaaaataaaaaatata

SEQ ID NO: 4592 - RNA, 23 nt, synthetic construct
  source 1..23: mol_type = other RNA
aaaaaaaataaaaaaaaaatata

SEQ ID NO: 4593 - RNA, 23 nt, synthetic construct
  source 1..23: mol_type = other RNA
aaaaaaaaaataaaaaaaatata

SEQ ID NO: 4594 - RNA, 23 nt, synthetic construct
  source 1..23: mol_type = other RNA
aaaataaaaaaaaaaaaaatata

SEQ ID NO: 4595 - RNA, 23 nt, synthetic construct
  source 1..23: mol_type = other RNA
aaaaaaaaaaataaaaaaatata

SEQ ID NO: 4596 - RNA, 23 nt, synthetic construct
  source 1..23: mol_type = other RNA
aaaaaataaaaaaaaaaaatata

SEQ ID NO: 4597 - RNA, 23 nt, synthetic construct
  source 1..23: mol_type = other RNA
aaaaaaaaaaaaaataaaatata

SEQ ID NO: 4598 - RNA, 23 nt, synthetic construct
  source 1..23: mol_type = other RNA
aaaaataaaaaaaaaaaaatata

SEQ ID NO: 4599 - RNA, 23 nt, synthetic construct
  source 1..23: mol_type = other RNA
aaaaaaataaaaaaaaaaatata

SEQ ID NO: 4600 - RNA, 23 nt, synthetic construct
  source 1..23: mol_type = other RNA
aaaaaaaaataaaaaaaaatata

SEQ ID NO: 4601 - RNA, 23 nt, synthetic construct
  source 1..23: mol_type = other RNA
aaataaataaataaataaaatat

SEQ ID NO: 4602 - RNA, 23 nt, synthetic construct
  source 1..23: mol_type = other RNA
aaataaaataaataaataaatat

SEQ ID NO: 4603 - RNA, 23 nt, synthetic construct
  source 1..23: mol_type = other RNA
aaataaataaataaaataaatat

SEQ ID NO: 4604 - RNA, 23 nt, synthetic construct
  source 1..23: mol_type = other RNA
aaataaataaaataaataaatat

SEQ ID NO: 4605 - RNA, 23 nt, synthetic construct
  source 1..23: mol_type = other RNA
aaaaaaaaaaaaaaaaaatatat

SEQ ID NO: 4606 - RNA, 23 nt, synthetic construct
  source 1..23: mol_type = other RNA
aaaataaataaaaaaaaaatata

SEQ ID NO: 4607 - RNA, 23 nt, synthetic construct
  source 1..23: mol_type = other RNA
aaaaaataaaaaaaataaatata

SEQ ID NO: 4608 - RNA, 23 nt, synthetic construct
  source 1..23: mol_type = other RNA
aaaaaaaataaataaaaaatata

SEQ ID NO: 4609 - RNA, 23 nt, synthetic construct
  source 1..23: mol_type = other RNA
aaaaaaaaataaataaaaatata

SEQ ID NO: 4610 - RNA, 23 nt, synthetic construct
  source 1..23: mol_type = other RNA
aaaataaaaaaaaaataaatata

SEQ ID NO: 4611 - RNA, 23 nt, synthetic construct
  source 1..23: mol_type = other RNA
aaaaaaaaaataaaataaatata

SEQ ID NO: 4612 - RNA, 23 nt, synthetic construct
  source 1..23: mol_type = other RNA
aaaaaaaataaaaaataaatata

SEQ ID NO: 4613 - RNA, 23 nt, synthetic construct
  source 1..23: mol_type = other RNA
aaaaaaaaataaaaataaatata

SEQ ID NO: 4614 - RNA, 23 nt, synthetic construct
  source 1..23: mol_type = other RNA
aaaaataaaaaaaaataaatata

SEQ ID NO: 4615 - RNA, 23 nt, synthetic construct
  source 1..23: mol_type = other RNA
aaaaataaataaaaaaaaatata

SEQ ID NO: 4616 - RNA, 23 nt, synthetic construct
  source 1..23: mol_type = other RNA
aaaaaaataaataaaaaaatata

SEQ ID NO: 4617 - RNA, 23 nt, synthetic construct
  source 1..23: mol_type = other RNA
aaaaaaataaaaaaataaatata

SEQ ID NO: 4618 - RNA, 23 nt, synthetic construct
  source 1..23: mol_type = other RNA
aaaaaaaaaataaataaaatata

SEQ ID NO: 4619 - RNA, 23 nt, synthetic construct
  source 1..23: mol_type = other RNA
aaaaaataaataaaaaaaatata

SEQ ID NO: 4620 - RNA, 23 nt, synthetic construct
  source 1..23: mol_type = other RNA
aaaaaaaaaaaaaaaaaaaaaaa

SEQ ID NO: 4621 - RNA, 23 nt, synthetic construct
  source 1..23: mol_type = other RNA
aaaaaaaaaaaaaataaatatat

SEQ ID NO: 4622 - RNA, 23 nt, synthetic construct
  source 1..23: mol_type = other RNA
aaaataaataaaaaataaatata

SEQ ID NO: 4623 - RNA, 23 nt, synthetic construct
  source 1..23: mol_type = other RNA
aaaataaataaataaaaaatata

SEQ ID NO: 4624 - RNA, 23 nt, synthetic construct
  source 1..23: mol_type = other RNA
aaaaaataaaataaataaatata

SEQ ID NO: 4625 - RNA, 23 nt, synthetic construct
  source 1..23: mol_type = other RNA
aaaataaaaaataaataaatata

SEQ ID NO: 4626 - RNA, 23 nt, synthetic construct
  source 1..23: mol_type = other RNA
aaaaataaataaaaataaatata

SEQ ID NO: 4627 - RNA, 23 nt, synthetic construct
  source 1..23: mol_type = other RNA
aaaaataaaaataaataaatata

SEQ ID NO: 4628 - RNA, 23 nt, synthetic construct
  source 1..23: mol_type = other RNA
aaaaaataaataaataaaatata

SEQ ID NO: 4629 - RNA, 23 nt, synthetic construct
  source 1..23: mol_type = other RNA
aaaaaataaataaaataaatata

SEQ ID NO: 4630 - RNA, 23 nt, synthetic construct
  source 1..23: mol_type = other RNA
aaaaataaataaataaaaatata

SEQ ID NO: 4631 - RNA, 23 nt, synthetic construct
  source 1..23: mol_type = other RNA
aaaaaaaaaataaataaatatat

SEQ ID NO: 4632 - RNA, 23 nt, synthetic construct
  source 1..23: mol_type = other RNA
aaaaaataaataaataaatatat

SEQ ID NO: 4633 - RNA, 23 nt, synthetic construct
  source 1..23: mol_type = other RNA
taaataaataaataaataaataa

SEQ ID NO: 4634 - RNA, 23 nt, synthetic construct
  source 1..23: mol_type = other RNA
aaatataaatatatataaatata

SEQ ID NO: 4635 - RNA, 23 nt, synthetic construct
  source 1..23: mol_type = other RNA
aaatataaatatataaatatata

SEQ ID NO: 4636 - RNA, 23 nt, synthetic construct
  source 1..23: mol_type = other RNA
aaatatatataaatataaatata

SEQ ID NO: 4637 - RNA, 23 nt, synthetic construct
  source 1..23: mol_type = other RNA
aaatatataaatatataaatata

SEQ ID NO: 4638 - RNA, 23 nt, synthetic construct
  source 1..23: mol_type = other RNA
aaatatataaatataaatatata

SEQ ID NO: 4639 - RNA, 23 nt, synthetic construct
  source 1..23: mol_type = other RNA
aaatataaatataaatatatata

SEQ ID NO: 4640 - RNA, 24 nt, synthetic construct
  source 1..24: mol_type = other RNA
aaaaaaaaaaaaaaaaaaaatata

SEQ ID NO: 4641 - RNA, 24 nt, synthetic construct
  source 1..24: mol_type = other RNA
aaaaaaaaaaaaaaaataaatata

SEQ ID NO: 4642 - RNA, 24 nt, synthetic construct
  source 1..24: mol_type = other RNA
aaaaaaaaaaaataaataaatata

SEQ ID NO: 4643 - RNA, 24 nt, synthetic construct
  source 1..24: mol_type = other RNA
aaaaaaaataaataaataaatata

SEQ ID NO: 4644 - RNA, 24 nt, synthetic construct
  source 1..24: mol_type = other RNA
aaaataaataaataaataaatata

SEQ ID NO: 4645 - RNA, 24 nt, synthetic construct
  source 1..24: mol_type = other RNA
aaataaataaataaatataaataa

SEQ ID NO: 4646 - RNA, 24 nt, synthetic construct
  source 1..24: mol_type = other RNA
aaataaataaatataaataaataa

SEQ ID NO: 4647 - RNA, 24 nt, synthetic construct
  source 1..24: mol_type = other RNA
aaataaataaataaataaatataa

SEQ ID NO: 4648 - RNA, 24 nt, synthetic construct
  source 1..24: mol_type = other RNA
aaatataaataaataaataaataa

SEQ ID NO: 4649 - RNA, 24 nt, synthetic construct
  source 1..24: mol_type = other RNA
aaataaatataaataaataaataa

SEQ ID NO: 4650 - RNA, 24 nt, synthetic construct
  source 1..24: mol_type = other RNA
aaaaaaaaaaaaaatataaatata

SEQ ID NO: 4651 - RNA, 24 nt, synthetic construct
  source 1..24: mol_type = other RNA
aaataaataaataaatataaatat

SEQ ID NO: 4652 - RNA, 24 nt, synthetic construct
  source 1..24: mol_type = other RNA
aaataaataaatataaataaatat

SEQ ID NO: 4653 - RNA, 24 nt, synthetic construct
  source 1..24: mol_type = other RNA
aaatataaataaataaataaatat

SEQ ID NO: 4654 - RNA, 24 nt, synthetic construct
  source 1..24: mol_type = other RNA
aaataaatataaataaataaatat

SEQ ID NO: 4655 - RNA, 24 nt, synthetic construct
  source 1..24: mol_type = other RNA
aaaaaaaaaatataaataaatata

SEQ ID NO: 4656 - RNA, 24 nt, synthetic construct
  source 1..24: mol_type = other RNA
aaaaaaaaaataaatataaatata

SEQ ID NO: 4657 - RNA, 24 nt, synthetic construct
  source 1..24: mol_type = other RNA
aaaaaataaatataaataaatata

SEQ ID NO: 4658 - RNA, 24 nt, synthetic construct
  source 1..24: mol_type = other RNA
aaaaaataaataaatataaatata

SEQ ID NO: 4659 - RNA, 24 nt, synthetic construct
  source 1..24: mol_type = other RNA
aaaaaatataaataaataaatata

SEQ ID NO: 4660 - RNA, 24 nt, synthetic construct
  source 1..24: mol_type = other RNA
aaataaaaaaaaaaaaaaaatata

SEQ ID NO: 4661 - RNA, 24 nt, synthetic construct
  source 1..24: mol_type = other RNA
aaataaataaaaaaaaaaaatata

SEQ ID NO: 4662 - RNA, 24 nt, synthetic construct
  source 1..24: mol_type = other RNA
aaataaaaaaaaaaaataaatata

SEQ ID NO: 4663 - RNA, 24 nt, synthetic construct
  source 1..24: mol_type = other RNA
aaataaataaataaaaaaaatata

SEQ ID NO: 4664 - RNA, 24 nt, synthetic construct
  source 1..24: mol_type = other RNA
aaataaataaaaaaaataaatata

SEQ ID NO: 4665 - RNA, 24 nt, synthetic construct
  source 1..24: mol_type = other RNA
aaataaaaaaaataaataaatata

SEQ ID NO: 4666 - RNA, 24 nt, synthetic construct
  source 1..24: mol_type = other RNA
aaataaataaataaaataaatata

SEQ ID NO: 4667 - RNA, 24 nt, synthetic construct
  source 1..24: mol_type = other RNA
aaataaataaaataaataaatata

SEQ ID NO: 4668 - RNA, 24 nt, synthetic construct
  source 1..24: mol_type = other RNA
aaataaataaataaataaaatata

SEQ ID NO: 4669 - RNA, 24 nt, synthetic construct
  source 1..24: mol_type = other RNA
aaataaaataaataaataaatata

SEQ ID NO: 4670 - RNA, 24 nt, synthetic construct
  source 1..24: mol_type = other RNA
aaaaaaaaaaaaaaaaaatatata

SEQ ID NO: 4671 - RNA, 24 nt, synthetic construct
  source 1..24: mol_type = other RNA
aaaaaaaaaaaaaataaatatata

SEQ ID NO: 4672 - RNA, 24 nt, synthetic construct
  source 1..24: mol_type = other RNA
aaataaataaataaataaatatat

SEQ ID NO: 4673 - RNA, 24 nt, synthetic construct
  source 1..24: mol_type = other RNA
aaaaaaaaaaaaaaaaaaaaataa

SEQ ID NO: 4674 - RNA, 24 nt, synthetic construct
  source 1..24: mol_type = other RNA
aaaaaaaaaataaataaatatata

SEQ ID NO: 4675 - RNA, 24 nt, synthetic construct
  source 1..24: mol_type = other RNA
aaaaaaaaaaaaaaaaataaataa

SEQ ID NO: 4676 - RNA, 24 nt, synthetic construct
  source 1..24: mol_type = other RNA
aaaaaataaataaataaatatata

SEQ ID NO: 4677 - RNA, 24 nt, synthetic construct
  source 1..24: mol_type = other RNA
aaaaaaaaaaaaataaataaataa

SEQ ID NO: 4678 - RNA, 24 nt, synthetic construct
  source 1..24: mol_type = other RNA
aaaaaaaaaaaaaaaaaaaataaa

SEQ ID NO: 4679 - RNA, 24 nt, synthetic construct
  source 1..24: mol_type = other RNA
aaaaaaaaataaataaataaataa

SEQ ID NO: 4680 - RNA, 24 nt, synthetic construct
  source 1..24: mol_type = other RNA
aaaaaaaaaaaaaaaataaataaa

SEQ ID NO: 4681 - RNA, 24 nt, synthetic construct
  source 1..24: mol_type = other RNA
aaaaataaataaataaataaataa

SEQ ID NO: 4682 - RNA, 24 nt, synthetic construct
  source 1..24: mol_type = other RNA
aaaaaaaaaaaataaataaataaa

SEQ ID NO: 4683 - RNA, 24 nt, synthetic construct
  source 1..24: mol_type = other RNA
aaaaaaaataaataaataaataaa

SEQ ID NO: 4684 - RNA, 24 nt, synthetic construct
  source 1..24: mol_type = other RNA
aaaataaataaataaataaataaa

SEQ ID NO: 4685 - RNA, 24 nt, synthetic construct
  source 1..24: mol_type = other RNA
aaaaaaaaaaaaaaaaaaaaatat

SEQ ID NO: 4686 - RNA, 24 nt, synthetic construct
  source 1..24: mol_type = other RNA
aaaaaaaaaaaaaaaaataaatat

SEQ ID NO: 4687 - RNA, 24 nt, synthetic construct
  source 1..24: mol_type = other RNA
taaataaataaataaataaatata

SEQ ID NO: 4688 - RNA, 24 nt, synthetic construct
  source 1..24: mol_type = other RNA
aaaaaaaaaaaaataaataaatat

SEQ ID NO: 4689 - RNA, 24 nt, synthetic construct
  source 1..24: mol_type = other RNA
aaaaaaaaataaataaataaatat

SEQ ID NO: 4690 - RNA, 24 nt, synthetic construct
  source 1..24: mol_type = other RNA
aaaaataaataaataaataaatat

SEQ ID NO: 4691 - RNA, 24 nt, synthetic construct
  source 1..24: mol_type = other RNA
aataaataaatataaataaatata

SEQ ID NO: 4692 - RNA, 24 nt, synthetic construct
  source 1..24: mol_type = other RNA
aataaataaataaatataaatata

SEQ ID NO: 4693 - RNA, 24 nt, synthetic construct
  source 1..24: mol_type = other RNA
aatataaataaataaataaatata

SEQ ID NO: 4694 - RNA, 24 nt, synthetic construct
  source 1..24: mol_type = other RNA
aataaatataaataaataaatata

SEQ ID NO: 4695 - RNA, 24 nt, synthetic construct
  source 1..24: mol_type = other RNA
aaaaaaaaaaaaaaaaaaaaaata

SEQ ID NO: 4696 - RNA, 24 nt, synthetic construct
  source 1..24: mol_type = other RNA
aaaaaaaaaaaaaaaaaataaata

SEQ ID NO: 4697 - RNA, 24 nt, synthetic construct
  source 1..24: mol_type = other RNA
aaaaaaaatataaatataaatata

SEQ ID NO: 4698 - RNA, 24 nt, synthetic construct
  source 1..24: mol_type = other RNA
aaaaaaaaaaaaaataaataaata

SEQ ID NO: 4699 - RNA, 24 nt, synthetic construct
  source 1..24: mol_type = other RNA
aaaataaatataaatataaatata

SEQ ID NO: 4700 - RNA, 24 nt, synthetic construct
  source 1..24: mol_type = other RNA
aaaatataaataaatataaatata

SEQ ID NO: 4701 - RNA, 24 nt, synthetic construct
  source 1..24: mol_type = other RNA
aaaatataaatataaataaatata

SEQ ID NO: 4702 - RNA, 24 nt, synthetic construct
  source 1..24: mol_type = other RNA
aaaaaaaaaataaataaataaata

SEQ ID NO: 4703 - RNA, 24 nt, synthetic construct
  source 1..24: mol_type = other RNA
aaaaaataaataaataaataaata

SEQ ID NO: 4704 - RNA, 24 nt, synthetic construct
  source 1..24: mol_type = other RNA
aaatataaaaaaaaaaaaaatata

SEQ ID NO: 4705 - RNA, 24 nt, synthetic construct
  source 1..24: mol_type = other RNA
aaataaatataaaaaaaaaatata

SEQ ID NO: 4706 - RNA, 24 nt, synthetic construct
  source 1..24: mol_type = other RNA
aaatataaataaaaaaaaaatata

SEQ ID NO: 4707 - RNA, 24 nt, synthetic construct
  source 1..24: mol_type = other RNA
aaatataaaaaaaaaataaatata

SEQ ID NO: 4708 - RNA, 24 nt, synthetic construct
  source 1..24: mol_type = other RNA
aaataaaaaaaaaatataaatata

SEQ ID NO: 4709 - RNA, 24 nt, synthetic construct
  source 1..24: mol_type = other RNA
aataaataaataaataaatatata

SEQ ID NO: 4710 - RNA, 24 nt, synthetic construct
  source 1..24: mol_type = other RNA
aaataaataaatataaaaaatata

SEQ ID NO: 4711 - RNA, 24 nt, synthetic construct
  source 1..24: mol_type = other RNA
aaataaatataaataaaaaatata

SEQ ID NO: 4712 - RNA, 24 nt, synthetic construct
  source 1..24: mol_type = other RNA
aaataaatataaaaaataaatata

SEQ ID NO: 4713 - RNA, 24 nt, synthetic construct
  source 1..24: mol_type = other RNA
aaataaaaaatataaataaatata

SEQ ID NO: 4714 - RNA, 24 nt, synthetic construct
  source 1..24: mol_type = other RNA
aaataaaaaataaatataaatata

SEQ ID NO: 4715 - RNA, 24 nt, synthetic construct
  source 1..24: mol_type = other RNA
aaatataaataaaaaataaatata

SEQ ID NO: 4716 - RNA, 24 nt, synthetic construct
  source 1..24: mol_type = other RNA
aaatataaaaaataaataaatata

SEQ ID NO: 4717 - RNA, 24 nt, synthetic construct
  source 1..24: mol_type = other RNA
aaatataaataaataaaaaatata

SEQ ID NO: 4718 - RNA, 24 nt, synthetic construct
  source 1..24: mol_type = other RNA
aaataaataaaaaatataaatata

SEQ ID NO: 4719 - RNA, 24 nt, synthetic construct
  source 1..24: mol_type = other RNA
aaaaaaaaaaaatataaatatata

SEQ ID NO: 4720 - RNA, 24 nt, synthetic construct
  source 1..24: mol_type = other RNA
aaaaaaaaaaaatatataaatata

SEQ ID NO: 4721 - RNA, 24 nt, synthetic construct
  source 1..24: mol_type = other RNA
aaaaaaaaaaaaaaaaaaatataa

SEQ ID NO: 4722 - RNA, 24 nt, synthetic construct
  source 1..24: mol_type = other RNA
aaaaaaaatatataaataaatata

SEQ ID NO: 4723 - RNA, 24 nt, synthetic construct
  source 1..24: mol_type = other RNA
aaaaaaaataaatataaatatata

SEQ ID NO: 4724 - RNA, 24 nt, synthetic construct
  source 1..24: mol_type = other RNA
aaaaaaaataaatatataaatata

SEQ ID NO: 4725 - RNA, 24 nt, synthetic construct
  source 1..24: mol_type = other RNA
aaaaaaaatataaataaatatata

SEQ ID NO: 4726 - RNA, 24 nt, synthetic construct
  source 1..24: mol_type = other RNA
aaaaaaaaaaaaaaatataaataa

SEQ ID NO: 4727 - RNA, 24 nt, synthetic construct
  source 1..24: mol_type = other RNA
aaaaaaaaaaaaaaataaatataa

SEQ ID NO: 4728 - RNA, 24 nt, synthetic construct
  source 1..24: mol_type = other RNA
aaaatatataaataaataaatata

SEQ ID NO: 4729 - RNA, 24 nt, synthetic construct
  source 1..24: mol_type = other RNA
aaaataaataaatatataaatata

SEQ ID NO: 4730 - RNA, 24 nt, synthetic construct
  source 1..24: mol_type = other RNA
aaaataaatatataaataaatata

SEQ ID NO: 4731 - RNA, 24 nt, synthetic construct
  source 1..24: mol_type = other RNA
aaaataaatataaataaatatata

SEQ ID NO: 4732 - RNA, 24 nt, synthetic construct
  source 1..24: mol_type = other RNA
aaaatataaataaataaatatata

SEQ ID NO: 4733 - RNA, 24 nt, synthetic construct
  source 1..24: mol_type = other RNA
aaaataaataaatataaatatata

SEQ ID NO: 4734 - RNA, 24 nt, synthetic construct
  source 1..24: mol_type = other RNA
aaaaaaaaaaatataaataaataa

SEQ ID NO: 4735 - RNA, 24 nt, synthetic construct
  source 1..24: mol_type = other RNA
aaaaaaaaaaataaatataaataa

SEQ ID NO: 4736 - RNA, 24 nt, synthetic construct
  source 1..24: mol_type = other RNA
aaaaaaaaaaataaataaatataa

SEQ ID NO: 4737 - RNA, 24 nt, synthetic construct
  source 1..24: mol_type = other RNA
aaaaaaaaaaaaaaaaaatataaa

SEQ ID NO: 4738 - RNA, 24 nt, synthetic construct
  source 1..24: mol_type = other RNA
aaaaaaataaataaatataaataa

SEQ ID NO: 4739 - RNA, 24 nt, synthetic construct
  source 1..24: mol_type = other RNA
aaaaaaataaataaataaatataa

SEQ ID NO: 4740 - RNA, 24 nt, synthetic construct
  source 1..24: mol_type = other RNA
aaaaaaataaatataaataaataa

SEQ ID NO: 4741 - RNA, 24 nt, synthetic construct
  source 1..24: mol_type = other RNA
aaaaaaatataaataaataaataa

SEQ ID NO: 4742 - RNA, 24 nt, synthetic construct
  source 1..24: mol_type = other RNA
aaaaaaaaaaaaaatataaataaa

SEQ ID NO: 4743 - RNA, 24 nt, synthetic construct
  source 1..24: mol_type = other RNA
aaaaaaaaaaaaaataaatataaa

SEQ ID NO: 4744 - RNA, 24 nt, synthetic construct
  source 1..24: mol_type = other RNA
aaataaaaaaaaaaaaaatatata

SEQ ID NO: 4745 - RNA, 24 nt, synthetic construct
  source 1..24: mol_type = other RNA
aaaaaaaaaataaataaatataaa

SEQ ID NO: 4746 - RNA, 24 nt, synthetic construct
  source 1..24: mol_type = other RNA
aaaaaaaaaatataaataaataaa

SEQ ID NO: 4747 - RNA, 24 nt, synthetic construct
  source 1..24: mol_type = other RNA
aaaaaaaaaataaatataaataaa

SEQ ID NO: 4748 - RNA, 24 nt, synthetic construct
  source 1..24: mol_type = other RNA
aaataaataaaaaaaaaatatata

SEQ ID NO: 4749 - RNA, 24 nt, synthetic construct
  source 1..24: mol_type = other RNA
aaataaaaaaaaaataaatatata

SEQ ID NO: 4750 - RNA, 24 nt, synthetic construct
  source 1..24: mol_type = other RNA
aaataaaaaaaaaaaaaaaaataa

SEQ ID NO: 4751 - RNA, 24 nt, synthetic construct
  source 1..24: mol_type = other RNA
aaaaaataaatataaataaataaa

SEQ ID NO: 4752 - RNA, 24 nt, synthetic construct
  source 1..24: mol_type = other RNA
aaaaaataaataaataaatataaa

SEQ ID NO: 4753 - RNA, 24 nt, synthetic construct
  source 1..24: mol_type = other RNA
aaaaaatataaataaataaataaa

SEQ ID NO: 4754 - RNA, 24 nt, synthetic construct
  source 1..24: mol_type = other RNA
aaaaaataaataaatataaataaa

SEQ ID NO: 4755 - RNA, 24 nt, synthetic construct
  source 1..24: mol_type = other RNA
aaataaataaataaaaaatatata

SEQ ID NO: 4756 - RNA, 24 nt, synthetic construct
  source 1..24: mol_type = other RNA
aaataaataaaaaataaatatata

SEQ ID NO: 4757 - RNA, 24 nt, synthetic construct
  source 1..24: mol_type = other RNA
aaataaaaaataaataaatatata

SEQ ID NO: 4758 - RNA, 24 nt, synthetic construct
  source 1..24: mol_type = other RNA
aaataaataaaaaaaaaaaaataa

SEQ ID NO: 4759 - RNA, 24 nt, synthetic construct
  source 1..24: mol_type = other RNA
aaataaaaaaaaaaaaataaataa

SEQ ID NO: 4760 - RNA, 24 nt, synthetic construct
  source 1..24: mol_type = other RNA
aaaaaaaaaaaaaaaatatatata

SEQ ID NO: 4761 - RNA, 24 nt, synthetic construct
  source 1..24: mol_type = other RNA
aaataaataaataaaaaaaaataa

SEQ ID NO: 4762 - RNA, 24 nt, synthetic construct
  source 1..24: mol_type = other RNA
aaataaataaaaaaaaataaataa

SEQ ID NO: 4763 - RNA, 24 nt, synthetic construct
  source 1..24: mol_type = other RNA
aaataaaaaaaaataaataaataa

SEQ ID NO: 4764 - RNA, 24 nt, synthetic construct
  source 1..24: mol_type = other RNA
aaaaaaaaaaaataaatatatata

SEQ ID NO: 4765 - RNA, 24 nt, synthetic construct
  source 1..24: mol_type = other RNA
aaataaaaaaaaaaaaaaaataaa

SEQ ID NO: 4766 - RNA, 24 nt, synthetic construct
  source 1..24: mol_type = other RNA
aaataaataaataaaaataaataa

SEQ ID NO: 4767 - RNA, 24 nt, synthetic construct
  source 1..24: mol_type = other RNA
aaataaataaataaataaaaataa

SEQ ID NO: 4768 - RNA, 24 nt, synthetic construct
  source 1..24: mol_type = other RNA
aaataaataaaaataaataaataa

SEQ ID NO: 4769 - RNA, 24 nt, synthetic construct
  source 1..24: mol_type = other RNA
aaataaaaataaataaataaataa

SEQ ID NO: 4770 - RNA, 24 nt, synthetic construct
  source 1..24: mol_type = other RNA
aaataaataaataaataaatatac

SEQ ID NO: 4771 - RNA, 24 nt, synthetic construct
  source 1..24: mol_type = other RNA
aaaaaaaataaataaatatatata

SEQ ID NO: 4772 - RNA, 24 nt, synthetic construct
  source 1..24: mol_type = other RNA
aaataaataaaaaaaaaaaataaa

SEQ ID NO: 4773 - RNA, 24 nt, synthetic construct
  source 1..24: mol_type = other RNA
aaataaaaaaaaaaaataaataaa

SEQ ID NO: 4774 - RNA, 24 nt, synthetic construct
  source 1..24: mol_type = other RNA
aaaataaataaataaatatatata

SEQ ID NO: 4775 - RNA, 24 nt, synthetic construct
  source 1..24: mol_type = other RNA
aaaaaaaaaaaaaaatataaatat

SEQ ID NO: 4776 - RNA, 24 nt, synthetic construct
  source 1..24: mol_type = other RNA
aaataaataaaaaaaataaataaa

SEQ ID NO: 4777 - RNA, 24 nt, synthetic construct
  source 1..24: mol_type = other RNA
aaataaataaataaaaaaaataaa

SEQ ID NO: 4778 - RNA, 24 nt, synthetic construct
  source 1..24: mol_type = other RNA
aaataaaaaaaataaataaataaa

SEQ ID NO: 4779 - RNA, 24 nt, synthetic construct
  source 1..24: mol_type = other RNA
aaaaaaaaaaataaatataaatat

SEQ ID NO: 4780 - RNA, 24 nt, synthetic construct
  source 1..24: mol_type = other RNA
aaaaaaaaaaatataaataaatat

SEQ ID NO: 4781 - RNA, 24 nt, synthetic construct
  source 1..24: mol_type = other RNA
aaataaataaataaaataaataaa

SEQ ID NO: 4782 - RNA, 24 nt, synthetic construct
  source 1..24: mol_type = other RNA
aaataaataaataaataaaataaa

SEQ ID NO: 4783 - RNA, 24 nt, synthetic construct
  source 1..24: mol_type = other RNA
aaataaataaaataaataaataaa

SEQ ID NO: 4784 - RNA, 24 nt, synthetic construct
  source 1..24: mol_type = other RNA
aaataaaataaataaataaataaa

SEQ ID NO: 4785 - RNA, 24 nt, synthetic construct
  source 1..24: mol_type = other RNA
aaaaaaataaataaatataaatat

SEQ ID NO: 4786 - RNA, 24 nt, synthetic construct
  source 1..24: mol_type = other RNA
aaaaaaataaatataaataaatat

SEQ ID NO: 4787 - RNA, 24 nt, synthetic construct
  source 1..24: mol_type = other RNA
aaaaaaatataaataaataaatat

SEQ ID NO: 4788 - RNA, 24 nt, synthetic construct
  source 1..24: mol_type = other RNA
aaaaaaaaaaaaaaaaaaaataat

SEQ ID NO: 4789 - RNA, 24 nt, synthetic construct
  source 1..24: mol_type = other RNA
aaataaaaaaaaaaaaaaaaatat

SEQ ID NO: 4790 - RNA, 24 nt, synthetic construct
  source 1..24: mol_type = other RNA
aaatataaataaatataaatataa

SEQ ID NO: 4791 - RNA, 24 nt, synthetic construct
  source 1..24: mol_type = other RNA
aaatataaatataaataaatataa

SEQ ID NO: 4792 - RNA, 24 nt, synthetic construct
  source 1..24: mol_type = other RNA
aaatataaatataaatataaataa

SEQ ID NO: 4793 - RNA, 24 nt, synthetic construct
  source 1..24: mol_type = other RNA
aaataaatataaatataaatataa

SEQ ID NO: 4794 - RNA, 24 nt, synthetic construct
  source 1..24: mol_type = other RNA
aaaaaaaaaaaaaaaataaataat

SEQ ID NO: 4795 - RNA, 24 nt, synthetic construct
  source 1..24: mol_type = other RNA
aaataaaaaaaaaaaaataaatat

SEQ ID NO: 4796 - RNA, 24 nt, synthetic construct
  source 1..24: mol_type = other RNA
aaataaataaaaaaaaaaaaatat

SEQ ID NO: 4797 - RNA, 24 nt, synthetic construct
  source 1..24: mol_type = other RNA
aaaaaaaaaaaataaataaataat

SEQ ID NO: 4798 - RNA, 24 nt, synthetic construct
  source 1..24: mol_type = other RNA
aaataaataaataaaaaaaaatat

SEQ ID NO: 4799 - RNA, 24 nt, synthetic construct
  source 1..24: mol_type = other RNA
aaataaataaaaaaaaataaatat

SEQ ID NO: 4800 - RNA, 24 nt, synthetic construct
  source 1..24: mol_type = other RNA
aaataaaaaaaaataaataaatat

SEQ ID NO: 4801 - RNA, 24 nt, synthetic construct
  source 1..24: mol_type = other RNA
aaaaaaaataaataaataaataat

SEQ ID NO: 4802 - RNA, 24 nt, synthetic construct
  source 1..24: mol_type = other RNA
aaaaaaaaaaaaataaaaaatata

SEQ ID NO: 4803 - RNA, 24 nt, synthetic construct
  source 1..24: mol_type = other RNA
aaaaaaaaaaataaaaaaaatata

SEQ ID NO: 4804 - RNA, 24 nt, synthetic construct
  source 1..24: mol_type = other RNA
aaaaaaataaaaaaaaaaaatata

SEQ ID NO: 4805 - RNA, 24 nt, synthetic construct
  source 1..24: mol_type = other RNA
aaaaaaaaaataaaaaaaaatata

SEQ ID NO: 4806 - RNA, 24 nt, synthetic construct
  source 1..24: mol_type = other RNA
aaaaaaaaaaaataaaaaaatata

SEQ ID NO: 4807 - RNA, 24 nt, synthetic construct
  source 1..24: mol_type = other RNA
aaaaaaaaataaaaaaaaaatata

SEQ ID NO: 4808 - RNA, 24 nt, synthetic construct
  source 1..24: mol_type = other RNA
aaaaataaaaaaaaaaaaaatata

SEQ ID NO: 4809 - RNA, 24 nt, synthetic construct
  source 1..24: mol_type = other RNA
aaaaaaaataaaaaaaaaaatata

SEQ ID NO: 4810 - RNA, 24 nt, synthetic construct
  source 1..24: mol_type = other RNA
aaaaaaaaaaaaaataaaaatata

SEQ ID NO: 4811 - RNA, 24 nt, synthetic construct
  source 1..24: mol_type = other RNA
aaaaaataaaaaaaaaaaaatata

SEQ ID NO: 4812 - RNA, 24 nt, synthetic construct
  source 1..24: mol_type = other RNA
aaaataaaaaaaaaaaaaaatata

SEQ ID NO: 4813 - RNA, 24 nt, synthetic construct
  source 1..24: mol_type = other RNA
aaaaaaaaaaaaaaataaaatata

SEQ ID NO: 4814 - RNA, 24 nt, synthetic construct
  source 1..24: mol_type = other RNA
aaataaataaataaataaaaatat

SEQ ID NO: 4815 - RNA, 24 nt, synthetic construct
  source 1..24: mol_type = other RNA
aaataaataaataaaaataaatat

SEQ ID NO: 4816 - RNA, 24 nt, synthetic construct
  source 1..24: mol_type = other RNA
aaataaaaataaataaataaatat

SEQ ID NO: 4817 - RNA, 24 nt, synthetic construct
  source 1..24: mol_type = other RNA
aaataaataaaaataaataaatat

SEQ ID NO: 4818 - RNA, 24 nt, synthetic construct
  source 1..24: mol_type = other RNA
aaaaaaaaaaaaaaaaaaatatat

SEQ ID NO: 4819 - RNA, 24 nt, synthetic construct
  source 1..24: mol_type = other RNA
aaaataaataaataaataaataat

SEQ ID NO: 4820 - RNA, 24 nt, synthetic construct
  source 1..24: mol_type = other RNA
aaaaaaaaaaataaataaaatata

SEQ ID NO: 4821 - RNA, 24 nt, synthetic construct
  source 1..24: mol_type = other RNA
aaaaaaaaataaataaaaaatata

SEQ ID NO: 4822 - RNA, 24 nt, synthetic construct
  source 1..24: mol_type = other RNA
aaaaaaataaataaaaaaaatata

SEQ ID NO: 4823 - RNA, 24 nt, synthetic construct
  source 1..24: mol_type = other RNA
aaaaaaaaaataaataaaaatata

SEQ ID NO: 4824 - RNA, 24 nt, synthetic construct
  source 1..24: mol_type = other RNA
aaaaataaataaaaaaaaaatata

SEQ ID NO: 4825 - RNA, 24 nt, synthetic construct
  source 1..24: mol_type = other RNA
aaaaaaaaaataaaaataaatata

SEQ ID NO: 4826 - RNA, 24 nt, synthetic construct
  source 1..24: mol_type = other RNA
aaaaaaaaataaaaaataaatata

SEQ ID NO: 4827 - RNA, 24 nt, synthetic construct
  source 1..24: mol_type = other RNA
aaaaaataaaaaaaaataaatata

SEQ ID NO: 4828 - RNA, 24 nt, synthetic construct
  source 1..24: mol_type = other RNA
aaaaaaataaaaaaaataaatata

SEQ ID NO: 4829 - RNA, 24 nt, synthetic construct
  source 1..24: mol_type = other RNA
aaaaataaaaaaaaaataaatata

SEQ ID NO: 4830 - RNA, 24 nt, synthetic construct
  source 1..24: mol_type = other RNA
aaaataaaaaaaaaaataaatata

SEQ ID NO: 4831 - RNA, 24 nt, synthetic construct
  source 1..24: mol_type = other RNA
aaaaaaaataaaaaaataaatata

SEQ ID NO: 4832 - RNA, 24 nt, synthetic construct
  source 1..24: mol_type = other RNA
aaaaaataaataaaaaaaaatata

SEQ ID NO: 4833 - RNA, 24 nt, synthetic construct
  source 1..24: mol_type = other RNA
aaaataaataaaaaaaaaaatata

SEQ ID NO: 4834 - RNA, 24 nt, synthetic construct
  source 1..24: mol_type = other RNA
aaaaaaaaaaataaaataaatata

SEQ ID NO: 4835 - RNA, 24 nt, synthetic construct
  source 1..24: mol_type = other RNA
aaaaaaaataaataaaaaaatata

SEQ ID NO: 4836 - RNA, 24 nt, synthetic construct
  source 1..24: mol_type = other RNA
aaaaaaaaaaaaaaaaaaaaaaaa

SEQ ID NO: 4837 - RNA, 24 nt, synthetic construct
  source 1..24: mol_type = other RNA
aaaaaaaaaaaaaaataaatatat

SEQ ID NO: 4838 - RNA, 24 nt, synthetic construct
  source 1..24: mol_type = other RNA
aaaaaaataaataaaataaatata

SEQ ID NO: 4839 - RNA, 24 nt, synthetic construct
  source 1..24: mol_type = other RNA
aaaaataaataaaaaataaatata

SEQ ID NO: 4840 - RNA, 24 nt, synthetic construct
  source 1..24: mol_type = other RNA
aaaaaataaaaataaataaatata

SEQ ID NO: 4841 - RNA, 24 nt, synthetic construct
  source 1..24: mol_type = other RNA
aaaaataaaaaataaataaatata

SEQ ID NO: 4842 - RNA, 24 nt, synthetic construct
  source 1..24: mol_type = other RNA
aaaataaataaaaaaataaatata

SEQ ID NO: 4843 - RNA, 24 nt, synthetic construct
  source 1..24: mol_type = other RNA
aaaaaataaataaaaataaatata

SEQ ID NO: 4844 - RNA, 24 nt, synthetic construct
  source 1..24: mol_type = other RNA
aaaaaataaataaataaaaatata

SEQ ID NO: 4845 - RNA, 24 nt, synthetic construct
  source 1..24: mol_type = other RNA
aaaataaaaaaataaataaatata

SEQ ID NO: 4846 - RNA, 24 nt, synthetic construct
  source 1..24: mol_type = other RNA
aaaataaataaataaaaaaatata

SEQ ID NO: 4847 - RNA, 24 nt, synthetic construct
  source 1..24: mol_type = other RNA
aaaaataaataaataaaaaatata

SEQ ID NO: 4848 - RNA, 24 nt, synthetic construct
  source 1..24: mol_type = other RNA
aaaaaaataaataaataaaatata

SEQ ID NO: 4849 - RNA, 24 nt, synthetic construct
  source 1..24: mol_type = other RNA
aaaaaaataaaataaataaatata

SEQ ID NO: 4850 - RNA, 25 nt, synthetic construct
  source 1..25: mol_type = other RNA
aaataaataaatataaataaatata

SEQ ID NO: 4851 - RNA, 25 nt, synthetic construct
  source 1..25: mol_type = other RNA
aaataaatataaataaataaatata

SEQ ID NO: 4852 - RNA, 25 nt, synthetic construct
  source 1..25: mol_type = other RNA
aaatataaataaataaataaatata

SEQ ID NO: 4853 - RNA, 25 nt, synthetic construct
  source 1..25: mol_type = other RNA
aaataaataaataaatataaatata

SEQ ID NO: 4854 - RNA, 25 nt, synthetic construct
  source 1..25: mol_type = other RNA
aaataaataaataaataaatatata

SEQ ID NO: 4855 - RNA, 25 nt, synthetic construct
  source 1..25: mol_type = other RNA
aaaaaaaaaaaaaaaaaaaaatata

SEQ ID NO: 4856 - RNA, 25 nt, synthetic construct
  source 1..25: mol_type = other RNA
aaaaaaaaaaaaaaaaataaatata

SEQ ID NO: 4857 - RNA, 25 nt, synthetic construct
  source 1..25: mol_type = other RNA
aaaaaaaaaaaaataaataaatata

SEQ ID NO: 4858 - RNA, 25 nt, synthetic construct
  source 1..25: mol_type = other RNA
aaaaaaaaataaataaataaatata

SEQ ID NO: 4859 - RNA, 25 nt, synthetic construct
  source 1..25: mol_type = other RNA
aaaaataaataaataaataaatata

SEQ ID NO: 4860 - RNA, 25 nt, synthetic construct
  source 1..25: mol_type = other RNA
aaataaataaataaataaataaata

SEQ ID NO: 4861 - RNA, 25 nt, synthetic construct
  source 1..25: mol_type = other RNA
aaataaataaataaataaatataaa

SEQ ID NO: 4862 - RNA, 25 nt, synthetic construct
  source 1..25: mol_type = other RNA
aaataaatataaataaataaataaa

SEQ ID NO: 4863 - RNA, 25 nt, synthetic construct
  source 1..25: mol_type = other RNA
aaataaataaataaatataaataaa

SEQ ID NO: 4864 - RNA, 25 nt, synthetic construct
  source 1..25: mol_type = other RNA
aaataaataaatataaataaataaa

SEQ ID NO: 4865 - RNA, 25 nt, synthetic construct
  source 1..25: mol_type = other RNA
aaatataaataaataaataaataaa

SEQ ID NO: 4866 - RNA, 25 nt, synthetic construct
  source 1..25: mol_type = other RNA
aaaaaaaaaaaaaaatataaatata

SEQ ID NO: 4867 - RNA, 25 nt, synthetic construct
  source 1..25: mol_type = other RNA
aaaaaaaaaaatataaataaatata

SEQ ID NO: 4868 - RNA, 25 nt, synthetic construct
  source 1..25: mol_type = other RNA
aaaaaaaaaaataaatataaatata

SEQ ID NO: 4869 - RNA, 25 nt, synthetic construct
  source 1..25: mol_type = other RNA
aaaaaaataaatataaataaatata

SEQ ID NO: 4870 - RNA, 25 nt, synthetic construct
  source 1..25: mol_type = other RNA
aaaaaaataaataaatataaatata

SEQ ID NO: 4871 - RNA, 25 nt, synthetic construct
  source 1..25: mol_type = other RNA
aaaaaaatataaataaataaatata

SEQ ID NO: 4872 - RNA, 25 nt, synthetic construct
  source 1..25: mol_type = other RNA
aaataaaaaaaaaaaaaaaaatata

SEQ ID NO: 4873 - RNA, 25 nt, synthetic construct
  source 1..25: mol_type = other RNA
aaataaaaaaaaaaaaataaatata

SEQ ID NO: 4874 - RNA, 25 nt, synthetic construct
  source 1..25: mol_type = other RNA
aaataaataaaaaaaaaaaaatata

SEQ ID NO: 4875 - RNA, 25 nt, synthetic construct
  source 1..25: mol_type = other RNA
aaataaataaaaaaaaataaatata

SEQ ID NO: 4876 - RNA, 25 nt, synthetic construct
  source 1..25: mol_type = other RNA
aaataaataaataaaaaaaaatata

SEQ ID NO: 4877 - RNA, 25 nt, synthetic construct
  source 1..25: mol_type = other RNA
aaataaaaaaaaataaataaatata

SEQ ID NO: 4878 - RNA, 25 nt, synthetic construct
  source 1..25: mol_type = other RNA
aaaaaaaaaaaaaaaaaaatatata

SEQ ID NO: 4879 - RNA, 25 nt, synthetic construct
  source 1..25: mol_type = other RNA
aaataaataaataaataaaaatata

SEQ ID NO: 4880 - RNA, 25 nt, synthetic construct
  source 1..25: mol_type = other RNA
aaataaataaataaaaataaatata

SEQ ID NO: 4881 - RNA, 25 nt, synthetic construct
  source 1..25: mol_type = other RNA
aaataaataaaaataaataaatata

SEQ ID NO: 4882 - RNA, 25 nt, synthetic construct
  source 1..25: mol_type = other RNA
aaataaaaataaataaataaatata

SEQ ID NO: 4883 - RNA, 25 nt, synthetic construct
  source 1..25: mol_type = other RNA
aaaaaaaaaaaaaaataaatatata

SEQ ID NO: 4884 - RNA, 25 nt, synthetic construct
  source 1..25: mol_type = other RNA
aaaaaaaaaaaaaaaaaaaaaataa

SEQ ID NO: 4885 - RNA, 25 nt, synthetic construct
  source 1..25: mol_type = other RNA
aaaaaaaaaaataaataaatatata

SEQ ID NO: 4886 - RNA, 25 nt, synthetic construct
  source 1..25: mol_type = other RNA
aaaaaaaaaaaaaaaaaataaataa

SEQ ID NO: 4887 - RNA, 25 nt, synthetic construct
  source 1..25: mol_type = other RNA
aaaaaaataaataaataaatatata

SEQ ID NO: 4888 - RNA, 25 nt, synthetic construct
  source 1..25: mol_type = other RNA
aaaaaaaaaaaaaataaataaataa

SEQ ID NO: 4889 - RNA, 25 nt, synthetic construct
  source 1..25: mol_type = other RNA
aaaaaaaaaaaaaaaaaaaaataaa

SEQ ID NO: 4890 - RNA, 25 nt, synthetic construct
  source 1..25: mol_type = other RNA
aaaaaaaaaataaataaataaataa

SEQ ID NO: 4891 - RNA, 25 nt, synthetic construct
  source 1..25: mol_type = other RNA
aaaaaaaaaaaaaaaaataaataaa

SEQ ID NO: 4892 - RNA, 25 nt, synthetic construct
  source 1..25: mol_type = other RNA
aaaaaataaataaataaataaataa

SEQ ID NO: 4893 - RNA, 25 nt, synthetic construct
  source 1..25: mol_type = other RNA
aaatataaatataaatataaatata

SEQ ID NO: 4894 - RNA, 25 nt, synthetic construct
  source 1..25: mol_type = other RNA
aaaaaaaaaaaaataaataaataaa

SEQ ID NO: 4895 - RNA, 25 nt, synthetic construct
  source 1..25: mol_type = other RNA
aaaaaaaaataaataaataaataaa

SEQ ID NO: 4896 - RNA, 25 nt, synthetic construct
  source 1..25: mol_type = other RNA
aaaaataaataaataaataaataaa

SEQ ID NO: 4897 - RNA, 25 nt, synthetic construct
  source 1..25: mol_type = other RNA
aaaaaaaaaaaaaaaaaaaaaatat

SEQ ID NO: 4898 - RNA, 25 nt, synthetic construct
  source 1..25: mol_type = other RNA
aaaaaaaaaaaaaaaaaataaatat

SEQ ID NO: 4899 - RNA, 25 nt, synthetic construct
  source 1..25: mol_type = other RNA
aaaaaaaaaaaaaataaataaatat

SEQ ID NO: 4900 - RNA, 25 nt, synthetic construct
  source 1..25: mol_type = other RNA
aaaaaaaaaataaataaataaatat

SEQ ID NO: 4901 - RNA, 25 nt, synthetic construct
  source 1..25: mol_type = other RNA
aaaaaataaataaataaataaatat

SEQ ID NO: 4902 - RNA, 25 nt, synthetic construct
  source 1..25: mol_type = other RNA
aaatatataaatataaataaatata

SEQ ID NO: 4903 - RNA, 25 nt, synthetic construct
  source 1..25: mol_type = other RNA
aaataaatataaatataaatatata

SEQ ID NO: 4904 - RNA, 25 nt, synthetic construct
  source 1..25: mol_type = other RNA
aaatataaataaatataaatatata

SEQ ID NO: 4905 - RNA, 25 nt, synthetic construct
  source 1..25: mol_type = other RNA
aaatataaatataaataaatatata

SEQ ID NO: 4906 - RNA, 25 nt, synthetic construct
  source 1..25: mol_type = other RNA
aaataaatatataaatataaatata

SEQ ID NO: 4907 - RNA, 25 nt, synthetic construct
  source 1..25: mol_type = other RNA
aaatataaatatataaataaatata

SEQ ID NO: 4908 - RNA, 25 nt, synthetic construct
  source 1..25: mol_type = other RNA
aaatatataaataaatataaatata

SEQ ID NO: 4909 - RNA, 25 nt, synthetic construct
  source 1..25: mol_type = other RNA
aaatataaataaatatataaatata

SEQ ID NO: 4910 - RNA, 25 nt, synthetic construct
  source 1..25: mol_type = other RNA
aaataaatataaatatataaatata

SEQ ID NO: 4911 - RNA, 25 nt, synthetic construct
  source 1..25: mol_type = other RNA
ataaataaataaataaataaatata

SEQ ID NO: 4912 - RNA, 25 nt, synthetic construct
  source 1..25: mol_type = other RNA
aaataaataaatataaatatatata

SEQ ID NO: 4913 - RNA, 25 nt, synthetic construct
  source 1..25: mol_type = other RNA
aaataaataaatatatataaatata

SEQ ID NO: 4914 - RNA, 25 nt, synthetic construct
  source 1..25: mol_type = other RNA
aaataaatatataaataaatatata

SEQ ID NO: 4915 - RNA, 25 nt, synthetic construct
  source 1..25: mol_type = other RNA
aaatatatataaataaataaatata

SEQ ID NO: 4916 - RNA, 25 nt, synthetic construct
  source 1..25: mol_type = other RNA
aaataaatatatataaataaatata

SEQ ID NO: 4917 - RNA, 25 nt, synthetic construct
  source 1..25: mol_type = other RNA
aaataaataaatatataaatatata

SEQ ID NO: 4918 - RNA, 25 nt, synthetic construct
  source 1..25: mol_type = other RNA
aaataaatataaataaatatatata

SEQ ID NO: 4919 - RNA, 25 nt, synthetic construct
  source 1..25: mol_type = other RNA
aaatatataaataaataaatatata

SEQ ID NO: 4920 - RNA, 25 nt, synthetic construct
  source 1..25: mol_type = other RNA
aaatataaataaataaatatatata

SEQ ID NO: 4921 - RNA, 25 nt, synthetic construct
  source 1..25: mol_type = other RNA
aaaaaaaaaaaaaaaaaaaaaaata

SEQ ID NO: 4922 - RNA, 25 nt, synthetic construct
  source 1..25: mol_type = other RNA
aaaaaaaaaaaaaaaaaaataaata

SEQ ID NO: 4923 - RNA, 25 nt, synthetic construct
  source 1..25: mol_type = other RNA
aaaaaaaaatataaatataaatata

SEQ ID NO: 4924 - RNA, 25 nt, synthetic construct
  source 1..25: mol_type = other RNA
aaaaaaaaaaaaaaataaataaata

SEQ ID NO: 4925 - RNA, 25 nt, synthetic construct
  source 1..25: mol_type = other RNA
aaaaatataaataaatataaatata

SEQ ID NO: 4926 - RNA, 25 nt, synthetic construct
  source 1..25: mol_type = other RNA
aaaaataaatataaatataaatata

SEQ ID NO: 4927 - RNA, 25 nt, synthetic construct
  source 1..25: mol_type = other RNA
aaaaatataaatataaataaatata

SEQ ID NO: 4928 - RNA, 25 nt, synthetic construct
  source 1..25: mol_type = other RNA
aaaaaaaaaaataaataaataaata

SEQ ID NO: 4929 - RNA, 25 nt, synthetic construct
  source 1..25: mol_type = other RNA
aaaaaaataaataaataaataaata

SEQ ID NO: 4930 - RNA, 25 nt, synthetic construct
  source 1..25: mol_type = other RNA
aaatataaaaaaaaaaaaaaatata

SEQ ID NO: 4931 - RNA, 25 nt, synthetic construct
  source 1..25: mol_type = other RNA
aaataaataaataaataaatataat

SEQ ID NO: 4932 - RNA, 25 nt, synthetic construct
  source 1..25: mol_type = other RNA
aaataaataaatataaataaataat

SEQ ID NO: 4933 - RNA, 25 nt, synthetic construct
  source 1..25: mol_type = other RNA
aaataaataaataaatataaataat

SEQ ID NO: 4934 - RNA, 25 nt, synthetic construct
  source 1..25: mol_type = other RNA
aaataaatataaataaataaataat

SEQ ID NO: 4935 - RNA, 25 nt, synthetic construct
  source 1..25: mol_type = other RNA
aaatataaataaataaataaataat

SEQ ID NO: 4936 - RNA, 25 nt, synthetic construct
  source 1..25: mol_type = other RNA
aaataaaaaaaaaaatataaatata

SEQ ID NO: 4937 - RNA, 25 nt, synthetic construct
  source 1..25: mol_type = other RNA
aaatataaataaaaaaaaaaatata

SEQ ID NO: 4938 - RNA, 25 nt, synthetic construct
  source 1..25: mol_type = other RNA
aaatataaaaaaaaaaataaatata

SEQ ID NO: 4939 - RNA, 25 nt, synthetic construct
  source 1..25: mol_type = other RNA
aaataaatataaaaaaaaaaatata

SEQ ID NO: 4940 - RNA, 25 nt, synthetic construct
  source 1..25: mol_type = other RNA
aaataaataaataaatatatatata

SEQ ID NO: 4941 - RNA, 25 nt, synthetic construct
  source 1..25: mol_type = other RNA
aaataaaaaaataaatataaatata

SEQ ID NO: 4942 - RNA, 25 nt, synthetic construct
  source 1..25: mol_type = other RNA
aaataaataaatataaaaaaatata

SEQ ID NO: 4943 - RNA, 25 nt, synthetic construct
  source 1..25: mol_type = other RNA
aaataaaaaaatataaataaatata

SEQ ID NO: 4944 - RNA, 25 nt, synthetic construct
  source 1..25: mol_type = other RNA
aaataaatataaataaaaaaatata

SEQ ID NO: 4945 - RNA, 25 nt, synthetic construct
  source 1..25: mol_type = other RNA
aaatataaataaataaaaaaatata

SEQ ID NO: 4946 - RNA, 25 nt, synthetic construct
  source 1..25: mol_type = other RNA
aaataaataaaaaaatataaatata

SEQ ID NO: 4947 - RNA, 25 nt, synthetic construct
  source 1..25: mol_type = other RNA
aaataaatataaaaaaataaatata

SEQ ID NO: 4948 - RNA, 25 nt, synthetic construct
  source 1..25: mol_type = other RNA
aaatataaataaaaaaataaatata

SEQ ID NO: 4949 - RNA, 25 nt, synthetic construct
  source 1..25: mol_type = other RNA
aaatataaaaaaataaataaatata

SEQ ID NO: 4950 - RNA, 25 nt, synthetic construct
  source 1..25: mol_type = other RNA
aataaataaataaataaataaataa

SEQ ID NO: 4951 - RNA, 25 nt, synthetic construct
  source 1..25: mol_type = other RNA
aaaaaaaaaaaaatataaatatata

SEQ ID NO: 4952 - RNA, 25 nt, synthetic construct
  source 1..25: mol_type = other RNA
aaaaaaaaaaaaatatataaatata

SEQ ID NO: 4953 - RNA, 25 nt, synthetic construct
  source 1..25: mol_type = other RNA
aaaaaaaaaaaaaaaaaaaatataa

SEQ ID NO: 4954 - RNA, 25 nt, synthetic construct
  source 1..25: mol_type = other RNA
aaaaaaaaataaatatataaatata

SEQ ID NO: 4955 - RNA, 25 nt, synthetic construct
  source 1..25: mol_type = other RNA
aaaaaaaaatataaataaatatata

SEQ ID NO: 4956 - RNA, 25 nt, synthetic construct
  source 1..25: mol_type = other RNA
aaaaaaaaataaatataaatatata

SEQ ID NO: 4957 - RNA, 25 nt, synthetic construct
  source 1..25: mol_type = other RNA
aaaaaaaaatatataaataaatata

SEQ ID NO: 4958 - RNA, 25 nt, synthetic construct
  source 1..25: mol_type = other RNA
aaaaaaaaaaaaaaaatataaataa

SEQ ID NO: 4959 - RNA, 25 nt, synthetic construct
  source 1..25: mol_type = other RNA
aaaaaaaaaaaaaaaataaatataa

SEQ ID NO: 4960 - RNA, 25 nt, synthetic construct
  source 1..25: mol_type = other RNA
aaaaataaataaatatataaatata

SEQ ID NO: 4961 - RNA, 25 nt, synthetic construct
  source 1..25: mol_type = other RNA
aaaaataaataaatataaatatata

SEQ ID NO: 4962 - RNA, 25 nt, synthetic construct
  source 1..25: mol_type = other RNA
aaaaatataaataaataaatatata

SEQ ID NO: 4963 - RNA, 25 nt, synthetic construct
  source 1..25: mol_type = other RNA
aaaaataaatataaataaatatata

SEQ ID NO: 4964 - RNA, 25 nt, synthetic construct
  source 1..25: mol_type = other RNA
aaaaataaatatataaataaatata

SEQ ID NO: 4965 - RNA, 25 nt, synthetic construct
  source 1..25: mol_type = other RNA
aaaaatatataaataaataaatata

SEQ ID NO: 4966 - RNA, 25 nt, synthetic construct
  source 1..25: mol_type = other RNA
aaaaaaaaaaaataaataaatataa

SEQ ID NO: 4967 - RNA, 25 nt, synthetic construct
  source 1..25: mol_type = other RNA
aaaaaaaaaaaataaatataaataa

SEQ ID NO: 4968 - RNA, 25 nt, synthetic construct
  source 1..25: mol_type = other RNA
aaaaaaaaaaaatataaataaataa

SEQ ID NO: 4969 - RNA, 25 nt, synthetic construct
  source 1..25: mol_type = other RNA
aaaaaaaaaaaaaaaaaaatataaa

SEQ ID NO: 4970 - RNA, 25 nt, synthetic construct
  source 1..25: mol_type = other RNA
aaaaaaaataaatataaataaataa

SEQ ID NO: 4971 - RNA, 25 nt, synthetic construct
  source 1..25: mol_type = other RNA
aaaaaaaataaataaatataaataa

SEQ ID NO: 4972 - RNA, 25 nt, synthetic construct
  source 1..25: mol_type = other RNA
aaaaaaaatataaataaataaataa

SEQ ID NO: 4973 - RNA, 25 nt, synthetic construct
  source 1..25: mol_type = other RNA
aaaaaaaataaataaataaatataa

SEQ ID NO: 4974 - RNA, 25 nt, synthetic construct
  source 1..25: mol_type = other RNA
aaaaaaaaaaaaaaataaatataaa

SEQ ID NO: 4975 - RNA, 25 nt, synthetic construct
  source 1..25: mol_type = other RNA
aaaaaaaaaaaaaaatataaataaa

SEQ ID NO: 4976 - RNA, 25 nt, synthetic construct
  source 1..25: mol_type = other RNA
aaataaaaaaaaaaaaaaatatata

SEQ ID NO: 4977 - RNA, 25 nt, synthetic construct
  source 1..25: mol_type = other RNA
aaaatataaataaataaataaataa

SEQ ID NO: 4978 - RNA, 25 nt, synthetic construct
  source 1..25: mol_type = other RNA
aaaataaataaataaataaatataa

SEQ ID NO: 4979 - RNA, 25 nt, synthetic construct
  source 1..25: mol_type = other RNA
aaaataaataaataaatataaataa

SEQ ID NO: 4980 - RNA, 25 nt, synthetic construct
  source 1..25: mol_type = other RNA
aaaataaatataaataaataaataa

SEQ ID NO: 4981 - RNA, 25 nt, synthetic construct
  source 1..25: mol_type = other RNA
aaaataaataaatataaataaataa

SEQ ID NO: 4982 - RNA, 25 nt, synthetic construct
  source 1..25: mol_type = other RNA
aaaaaaaaaaatataaataaataaa

SEQ ID NO: 4983 - RNA, 25 nt, synthetic construct
  source 1..25: mol_type = other RNA
aaaaaaaaaaataaataaatataaa

SEQ ID NO: 4984 - RNA, 25 nt, synthetic construct
  source 1..25: mol_type = other RNA
aaaaaaaaaaataaatataaataaa

SEQ ID NO: 4985 - RNA, 25 nt, synthetic construct
  source 1..25: mol_type = other RNA
aaataaataaaaaaaaaaatatata

SEQ ID NO: 4986 - RNA, 25 nt, synthetic construct
  source 1..25: mol_type = other RNA
aaataaaaaaaaaaataaatatata

SEQ ID NO: 4987 - RNA, 25 nt, synthetic construct
  source 1..25: mol_type = other RNA
aaataaaaaaaaaaaaaaaaaataa

SEQ ID NO: 4988 - RNA, 25 nt, synthetic construct
  source 1..25: mol_type = other RNA
aaaaaaataaatataaataaataaa

SEQ ID NO: 4989 - RNA, 25 nt, synthetic construct
  source 1..25: mol_type = other RNA
aaaaaaataaataaatataaataaa

SEQ ID NO: 4990 - RNA, 25 nt, synthetic construct
  source 1..25: mol_type = other RNA
aaaaaaataaataaataaatataaa

SEQ ID NO: 4991 - RNA, 25 nt, synthetic construct
  source 1..25: mol_type = other RNA
aaaaaaatataaataaataaataaa

SEQ ID NO: 4992 - RNA, 25 nt, synthetic construct
  source 1..25: mol_type = other RNA
aaataaataaataaaaaaatatata

SEQ ID NO: 4993 - RNA, 25 nt, synthetic construct
  source 1..25: mol_type = other RNA
aaataaaaaaataaataaatatata

SEQ ID NO: 4994 - RNA, 25 nt, synthetic construct
  source 1..25: mol_type = other RNA
aaataaataaaaaaataaatatata

SEQ ID NO: 4995 - RNA, 25 nt, synthetic construct
  source 1..25: mol_type = other RNA
aaatataaatataaataaataaata

SEQ ID NO: 4996 - RNA, 25 nt, synthetic construct
  source 1..25: mol_type = other RNA
aaataaatataaatataaataaata

SEQ ID NO: 4997 - RNA, 25 nt, synthetic construct
  source 1..25: mol_type = other RNA
aaatataaataaatataaataaata

SEQ ID NO: 4998 - RNA, 25 nt, synthetic construct
  source 1..25: mol_type = other RNA
aaataaataaatataaatataaata

SEQ ID NO: 4999 - RNA, 25 nt, synthetic construct
  source 1..25: mol_type = other RNA
aaataaatataaataaatataaata

SEQ ID NO: 5000 - RNA, 25 nt, synthetic construct
  source 1..25: mol_type = other RNA
aaatataaataaataaatataaata

SEQ ID NO: 5001 - RNA, 25 nt, synthetic construct
  source 1..25: mol_type = other RNA
aaataaataaaaaaaaaaaaaataa

SEQ ID NO: 5002 - RNA, 25 nt, synthetic construct
  source 1..25: mol_type = other RNA
aaataaaaaaaaaaaaaataaataa

SEQ ID NO: 5003 - RNA, 25 nt, synthetic construct
  source 1..25: mol_type = other RNA
aaaaaaaaaaaaaaaaatatatata

SEQ ID NO: 5004 - RNA, 25 nt, synthetic construct
  source 1..25: mol_type = other RNA
aaataaataaaaaaaaaataaataa

SEQ ID NO: 5005 - RNA, 25 nt, synthetic construct
  source 1..25: mol_type = other RNA
aaataaataaataaaaaaaaaataa

SEQ ID NO: 5006 - RNA, 25 nt, synthetic construct
  source 1..25: mol_type = other RNA
aaataaaaaaaaaataaataaataa

SEQ ID NO: 5007 - RNA, 25 nt, synthetic construct
  source 1..25: mol_type = other RNA
aaaaaaaaaaaaataaatatatata

SEQ ID NO: 5008 - RNA, 25 nt, synthetic construct
  source 1..25: mol_type = other RNA
aataaataaataaataaataaatat

SEQ ID NO: 5009 - RNA, 25 nt, synthetic construct
  source 1..25: mol_type = other RNA
aaataaaaaaaaaaaaaaaaataaa

SEQ ID NO: 5010 - RNA, 25 nt, synthetic construct
  source 1..25: mol_type = other RNA
aaataaataaataaaaaataaataa

SEQ ID NO: 5011 - RNA, 25 nt, synthetic construct
  source 1..25: mol_type = other RNA
aaataaataaataaataaaaaataa

SEQ ID NO: 5012 - RNA, 25 nt, synthetic construct
  source 1..25: mol_type = other RNA
aaataaaaaataaataaataaataa

SEQ ID NO: 5013 - RNA, 25 nt, synthetic construct
  source 1..25: mol_type = other RNA
aaataaataaaaaataaataaataa

SEQ ID NO: 5014 - RNA, 25 nt, synthetic construct
  source 1..25: mol_type = other RNA
aaaaaaaaataaataaatatatata

SEQ ID NO: 5015 - RNA, 25 nt, synthetic construct
  source 1..25: mol_type = other RNA
aaataaataaaaaaaaaaaaataaa

SEQ ID NO: 5016 - RNA, 25 nt, synthetic construct
  source 1..25: mol_type = other RNA
aaataaaaaaaaaaaaataaataaa

SEQ ID NO: 5017 - RNA, 25 nt, synthetic construct
  source 1..25: mol_type = other RNA
aaaaataaataaataaatatatata

SEQ ID NO: 5018 - RNA, 25 nt, synthetic construct
  source 1..25: mol_type = other RNA
aaaaaaaaaaaaaaaatataaatat

SEQ ID NO: 5019 - RNA, 25 nt, synthetic construct
  source 1..25: mol_type = other RNA
aaataaataaaaaaaaataaataaa

SEQ ID NO: 5020 - RNA, 25 nt, synthetic construct
  source 1..25: mol_type = other RNA
aaataaataaataaaaaaaaataaa

SEQ ID NO: 5021 - RNA, 25 nt, synthetic construct
  source 1..25: mol_type = other RNA
aaataaaaaaaaataaataaataaa

SEQ ID NO: 5022 - RNA, 25 nt, synthetic construct
  source 1..25: mol_type = other RNA
aaaaaaaaaaaataaatataaatat

SEQ ID NO: 5023 - RNA, 25 nt, synthetic construct
  source 1..25: mol_type = other RNA
aaaaaaaaaaaatataaataaatat

SEQ ID NO: 5024 - RNA, 25 nt, synthetic construct
  source 1..25: mol_type = other RNA
aaataaataaataaataaaaataaa

SEQ ID NO: 5025 - RNA, 25 nt, synthetic construct
  source 1..25: mol_type = other RNA
aaataaataaaaataaataaataaa

SEQ ID NO: 5026 - RNA, 25 nt, synthetic construct
  source 1..25: mol_type = other RNA
aaataaaaataaataaataaataaa

SEQ ID NO: 5027 - RNA, 25 nt, synthetic construct
  source 1..25: mol_type = other RNA
aaataaataaataaaaataaataaa

SEQ ID NO: 5028 - RNA, 25 nt, synthetic construct
  source 1..25: mol_type = other RNA
aaaaaaaatataaataaataaatat

SEQ ID NO: 5029 - RNA, 25 nt, synthetic construct
  source 1..25: mol_type = other RNA
aaaaaaaataaataaatataaatat

SEQ ID NO: 5030 - RNA, 25 nt, synthetic construct
  source 1..25: mol_type = other RNA
aaaaaaaataaatataaataaatat

SEQ ID NO: 5031 - RNA, 25 nt, synthetic construct
  source 1..25: mol_type = other RNA
aaaatataaataaataaataaatat

SEQ ID NO: 5032 - RNA, 25 nt, synthetic construct
  source 1..25: mol_type = other RNA
aaaataaatataaataaataaatat

SEQ ID NO: 5033 - RNA, 25 nt, synthetic construct
  source 1..25: mol_type = other RNA
aaaataaataaatataaataaatat

SEQ ID NO: 5034 - RNA, 25 nt, synthetic construct
  source 1..25: mol_type = other RNA
aaaataaataaataaatataaatat

SEQ ID NO: 5035 - RNA, 25 nt, synthetic construct
  source 1..25: mol_type = other RNA
aaaaaaaaaaaaaaaaaaaaataat

SEQ ID NO: 5036 - RNA, 25 nt, synthetic construct
  source 1..25: mol_type = other RNA
aaataaaaaaaaaaaaaaaaaatat

SEQ ID NO: 5037 - RNA, 25 nt, synthetic construct
  source 1..25: mol_type = other RNA
aaataaataaataaatatataaata

SEQ ID NO: 5038 - RNA, 25 nt, synthetic construct
  source 1..25: mol_type = other RNA
aaatatataaataaataaataaata

SEQ ID NO: 5039 - RNA, 25 nt, synthetic construct
  source 1..25: mol_type = other RNA
aaataaataaatatataaataaata

SEQ ID NO: 5040 - RNA, 25 nt, synthetic construct
  source 1..25: mol_type = other RNA
aaataaatatataaataaataaata

SEQ ID NO: 5041 - RNA, 25 nt, synthetic construct
  source 1..25: mol_type = other RNA
aaaaaaaaaaaaaaaaataaataat

SEQ ID NO: 5042 - RNA, 25 nt, synthetic construct
  source 1..25: mol_type = other RNA
aaataaataaaaaaaaaaaaaatat

SEQ ID NO: 5043 - RNA, 25 nt, synthetic construct
  source 1..25: mol_type = other RNA
aaataaaaaaaaaaaaaataaatat

SEQ ID NO: 5044 - RNA, 25 nt, synthetic construct
  source 1..25: mol_type = other RNA
aaaaaaaaaaaaataaataaataat

SEQ ID NO: 5045 - RNA, 25 nt, synthetic construct
  source 1..25: mol_type = other RNA
aaataaaaaaaaaataaataaatat

SEQ ID NO: 5046 - RNA, 25 nt, synthetic construct
  source 1..25: mol_type = other RNA
aaataaataaaaaaaaaataaatat

SEQ ID NO: 5047 - RNA, 25 nt, synthetic construct
  source 1..25: mol_type = other RNA
aaataaataaataaaaaaaaaatat

SEQ ID NO: 5048 - RNA, 25 nt, synthetic construct
  source 1..25: mol_type = other RNA
aaaaaaaaataaataaataaataat

SEQ ID NO: 5049 - RNA, 25 nt, synthetic construct
  source 1..25: mol_type = other RNA
aaaaaataaaaaaaaaaaaaatata

SEQ ID NO: 5050 - RNA, 25 nt, synthetic construct
  source 1..25: mol_type = other RNA
aaaataaaaaaaaaaaaaaaatata

SEQ ID NO: 5051 - RNA, 25 nt, synthetic construct
  source 1..25: mol_type = other RNA
aaaaaaaataaaaaaaaaaaatata

SEQ ID NO: 5052 - RNA, 25 nt, synthetic construct
  source 1..25: mol_type = other RNA
aaaaaaaaaaataaaaaaaaatata

SEQ ID NO: 5053 - RNA, 25 nt, synthetic construct
  source 1..25: mol_type = other RNA
aaaaaaaaaaaaaaataaaaatata

SEQ ID NO: 5054 - RNA, 25 nt, synthetic construct
  source 1..25: mol_type = other RNA
aaaaaaataaaaaaaaaaaaatata

SEQ ID NO: 5055 - RNA, 25 nt, synthetic construct
  source 1..25: mol_type = other RNA
aaaaataaaaaaaaaaaaaaatata

SEQ ID NO: 5056 - RNA, 25 nt, synthetic construct
  source 1..25: mol_type = other RNA
aaaaaaaaaaaaaaaataaaatata

SEQ ID NO: 5057 - RNA, 25 nt, synthetic construct
  source 1..25: mol_type = other RNA
aaaaaaaaaaaaaataaaaaatata

SEQ ID NO: 5058 - RNA, 25 nt, synthetic construct
  source 1..25: mol_type = other RNA
aaaaaaaaaaaataaaaaaaatata

SEQ ID NO: 5059 - RNA, 25 nt, synthetic construct
  source 1..25: mol_type = other RNA
aaaaaaaaaaaaataaaaaaatata

SEQ ID NO: 5060 - RNA, 25 nt, synthetic construct
  source 1..25: mol_type = other RNA
aaaaaaaaataaaaaaaaaaatata

SEQ ID NO: 5061 - RNA, 25 nt, synthetic construct
  source 1..25: mol_type = other RNA
aaaaaaaaaataaaaaaaaaatata

SEQ ID NO: 5062 - RNA, 26 nt, synthetic construct
  source 1..26: mol_type = other RNA
aaataaataaataaataaataaataa

SEQ ID NO: 5063 - RNA, 26 nt, synthetic construct
  source 1..26: mol_type = other RNA
aaaaaaaaaaaaaaaaaaaaaatata

SEQ ID NO: 5064 - RNA, 26 nt, synthetic construct
  source 1..26: mol_type = other RNA
aaaaaaaaaaaaaaaaaataaatata

SEQ ID NO: 5065 - RNA, 26 nt, synthetic construct
  source 1..26: mol_type = other RNA
aaaaaaaaaaaaaataaataaatata

SEQ ID NO: 5066 - RNA, 26 nt, synthetic construct
  source 1..26: mol_type = other RNA
aaataaataaataaataaataaatat

SEQ ID NO: 5067 - RNA, 26 nt, synthetic construct
  source 1..26: mol_type = other RNA
aaaaaaaaaataaataaataaatata

SEQ ID NO: 5068 - RNA, 26 nt, synthetic construct
  source 1..26: mol_type = other RNA
aaaaaataaataaataaataaatata

SEQ ID NO: 5069 - RNA, 26 nt, synthetic construct
  source 1..26: mol_type = other RNA
aataaataaataaataaataaatata

SEQ ID NO: 5070 - RNA, 26 nt, synthetic construct
  source 1..26: mol_type = other RNA
aaaaaaaaaaaaaaaatataaatata

SEQ ID NO: 5071 - RNA, 26 nt, synthetic construct
  source 1..26: mol_type = other RNA
aaaaaaaaaaaataaatataaatata

SEQ ID NO: 5072 - RNA, 26 nt, synthetic construct
  source 1..26: mol_type = other RNA
aaaaaaaaaaaatataaataaatata

SEQ ID NO: 5073 - RNA, 26 nt, synthetic construct
  source 1..26: mol_type = other RNA
aaaaaaaataaataaatataaatata

SEQ ID NO: 5074 - RNA, 26 nt, synthetic construct
  source 1..26: mol_type = other RNA
aaaaaaaataaatataaataaatata

SEQ ID NO: 5075 - RNA, 26 nt, synthetic construct
  source 1..26: mol_type = other RNA
aaaaaaaatataaataaataaatata

SEQ ID NO: 5076 - RNA, 26 nt, synthetic construct
  source 1..26: mol_type = other RNA
aaaataaataaataaatataaatata

SEQ ID NO: 5077 - RNA, 26 nt, synthetic construct
  source 1..26: mol_type = other RNA
aaaataaataaatataaataaatata

SEQ ID NO: 5078 - RNA, 26 nt, synthetic construct
  source 1..26: mol_type = other RNA
aaaatataaataaataaataaatata

SEQ ID NO: 5079 - RNA, 26 nt, synthetic construct
  source 1..26: mol_type = other RNA
aaaataaatataaataaataaatata

SEQ ID NO: 5080 - RNA, 26 nt, synthetic construct
  source 1..26: mol_type = other RNA
aaataaaaaaaaaaaaaaaaaatata

SEQ ID NO: 5081 - RNA, 26 nt, synthetic construct
  source 1..26: mol_type = other RNA
aaataaaaaaaaaaaaaataaatata

SEQ ID NO: 5082 - RNA, 26 nt, synthetic construct
  source 1..26: mol_type = other RNA
aaataaataaaaaaaaaaaaaatata

SEQ ID NO: 5083 - RNA, 26 nt, synthetic construct
  source 1..26: mol_type = other RNA
aaataaataaataaaaaaaaaatata

SEQ ID NO: 5084 - RNA, 26 nt, synthetic construct
  source 1..26: mol_type = other RNA
aaataaaaaaaaaataaataaatata

SEQ ID NO: 5085 - RNA, 26 nt, synthetic construct
  source 1..26: mol_type = other RNA
aaataaataaaaaaaaaataaatata

SEQ ID NO: 5086 - RNA, 26 nt, synthetic construct
  source 1..26: mol_type = other RNA
aaataaataaataaataaaaaatata

SEQ ID NO: 5087 - RNA, 26 nt, synthetic construct
  source 1..26: mol_type = other RNA
aaataaataaaaaataaataaatata

SEQ ID NO: 5088 - RNA, 26 nt, synthetic construct
  source 1..26: mol_type = other RNA
aaataaaaaataaataaataaatata

SEQ ID NO: 5089 - RNA, 26 nt, synthetic construct
  source 1..26: mol_type = other RNA
aaataaataaataaaaaataaatata

SEQ ID NO: 5090 - RNA, 26 nt, synthetic construct
  source 1..26: mol_type = other RNA
aaaaaaaaaaaaaaaaaaaatatata

SEQ ID NO: 5091 - RNA, 26 nt, synthetic construct
  source 1..26: mol_type = other RNA
aaaaaaaaaaaaaaaataaatatata

SEQ ID NO: 5092 - RNA, 26 nt, synthetic construct
  source 1..26: mol_type = other RNA
aaaaaaaaaaaaaaaaaaaaaaataa

SEQ ID NO: 5093 - RNA, 26 nt, synthetic construct
  source 1..26: mol_type = other RNA
aaaaaaaaaaaataaataaatatata

SEQ ID NO: 5094 - RNA, 26 nt, synthetic construct
  source 1..26: mol_type = other RNA
aaaaaaaaaaaaaaaaaaataaataa

SEQ ID NO: 5095 - RNA, 26 nt, synthetic construct
  source 1..26: mol_type = other RNA
aaaaaaaataaataaataaatatata

SEQ ID NO: 5096 - RNA, 26 nt, synthetic construct
  source 1..26: mol_type = other RNA
aaaaaaaaaaaaaaataaataaataa

SEQ ID NO: 5097 - RNA, 26 nt, synthetic construct
  source 1..26: mol_type = other RNA
aaaataaataaataaataaatatata

SEQ ID NO: 5098 - RNA, 26 nt, synthetic construct
  source 1..26: mol_type = other RNA
aaaaaaaaaaaaaaaaaaaaaataaa

SEQ ID NO: 5099 - RNA, 26 nt, synthetic construct
  source 1..26: mol_type = other RNA
aaaaaaaaaaataaataaataaataa

SEQ ID NO: 5100 - RNA, 26 nt, synthetic construct
  source 1..26: mol_type = other RNA
aaaaaaaaaaaaaaaaaataaataaa

SEQ ID NO: 5101 - RNA, 26 nt, synthetic construct
  source 1..26: mol_type = other RNA
aaaaaaataaataaataaataaataa

SEQ ID NO: 5102 - RNA, 26 nt, synthetic construct
  source 1..26: mol_type = other RNA
aaaaaaaaaaaaaataaataaataaa

SEQ ID NO: 5103 - RNA, 26 nt, synthetic construct
  source 1..26: mol_type = other RNA
aaaaaaaaaataaataaataaataaa

SEQ ID NO: 5104 - RNA, 26 nt, synthetic construct
  source 1..26: mol_type = other RNA
aaaaaataaataaataaataaataaa

SEQ ID NO: 5105 - RNA, 26 nt, synthetic construct
  source 1..26: mol_type = other RNA
aaaaaaaaaaaaaaaaaaaaaaatat

SEQ ID NO: 5106 - RNA, 26 nt, synthetic construct
  source 1..26: mol_type = other RNA
aaaaaaaaaaaaaaaaaaataaatat

SEQ ID NO: 5107 - RNA, 26 nt, synthetic construct
  source 1..26: mol_type = other RNA
aaaaaaaaaaaaaaataaataaatat

SEQ ID NO: 5108 - RNA, 26 nt, synthetic construct
  source 1..26: mol_type = other RNA
aaaaaaaaaaataaataaataaatat

SEQ ID NO: 5109 - RNA, 26 nt, synthetic construct
  source 1..26: mol_type = other RNA
aaaaaaataaataaataaataaatat

SEQ ID NO: 5110 - RNA, 26 nt, synthetic construct
  source 1..26: mol_type = other RNA
aaataaataaatataaataaatataa

SEQ ID NO: 5111 - RNA, 26 nt, synthetic construct
  source 1..26: mol_type = other RNA
aaataaataaatataaatataaataa

SEQ ID NO: 5112 - RNA, 26 nt, synthetic construct
  source 1..26: mol_type = other RNA
aaataaatataaataaataaatataa

SEQ ID NO: 5113 - RNA, 26 nt, synthetic construct
  source 1..26: mol_type = other RNA
aaataaataaataaatataaatataa

SEQ ID NO: 5114 - RNA, 26 nt, synthetic construct
  source 1..26: mol_type = other RNA
aaataaatataaatataaataaataa

SEQ ID NO: 5115 - RNA, 26 nt, synthetic construct
  source 1..26: mol_type = other RNA
aaataaatataaataaatataaataa

SEQ ID NO: 5116 - RNA, 26 nt, synthetic construct
  source 1..26: mol_type = other RNA
aaatataaataaataaataaatataa

SEQ ID NO: 5117 - RNA, 26 nt, synthetic construct
  source 1..26: mol_type = other RNA
aaatataaataaataaatataaataa

SEQ ID NO: 5118 - RNA, 26 nt, synthetic construct
  source 1..26: mol_type = other RNA
aaatataaataaatataaataaataa

SEQ ID NO: 5119 - RNA, 26 nt, synthetic construct
  source 1..26: mol_type = other RNA
aaatataaatataaataaataaataa

SEQ ID NO: 5120 - RNA, 26 nt, synthetic construct
  source 1..26: mol_type = other RNA
aaataaataaataaataaataatata

SEQ ID NO: 5121 - RNA, 26 nt, synthetic construct
  source 1..26: mol_type = other RNA
aaataaataaataataaataaatata

SEQ ID NO: 5122 - RNA, 26 nt, synthetic construct
  source 1..26: mol_type = other RNA
aaataaataaataaataataaatata

SEQ ID NO: 5123 - RNA, 26 nt, synthetic construct
  source 1..26: mol_type = other RNA
aaataaataataaataaataaatata

SEQ ID NO: 5124 - RNA, 26 nt, synthetic construct
  source 1..26: mol_type = other RNA
aaataataaataaataaataaatata

SEQ ID NO: 5125 - RNA, 26 nt, synthetic construct
  source 1..26: mol_type = other RNA
aaaaaaaaaaaaaaaaaaaaaaaata

SEQ ID NO: 5126 - RNA, 26 nt, synthetic construct
  source 1..26: mol_type = other RNA
aaataaataaataaataaatatataa

SEQ ID NO: 5127 - RNA, 26 nt, synthetic construct
  source 1..26: mol_type = other RNA
aaataaataaatatataaataaataa

SEQ ID NO: 5128 - RNA, 26 nt, synthetic construct
  source 1..26: mol_type = other RNA
aaataaataaataaatatataaataa

SEQ ID NO: 5129 - RNA, 26 nt, synthetic construct
  source 1..26: mol_type = other RNA
aaataaatatataaataaataaataa

SEQ ID NO: 5130 - RNA, 26 nt, synthetic construct
  source 1..26: mol_type = other RNA
aaatatataaataaataaataaataa

SEQ ID NO: 5131 - RNA, 26 nt, synthetic construct
  source 1..26: mol_type = other RNA
aaataaataaatataaatataaatat

SEQ ID NO: 5132 - RNA, 26 nt, synthetic construct
  source 1..26: mol_type = other RNA
aaataaatataaataaatataaatat

SEQ ID NO: 5133 - RNA, 26 nt, synthetic construct
  source 1..26: mol_type = other RNA
aaataaatataaatataaataaatat

SEQ ID NO: 5134 - RNA, 26 nt, synthetic construct
  source 1..26: mol_type = other RNA
aaatataaataaataaatataaatat

SEQ ID NO: 5135 - RNA, 26 nt, synthetic construct
  source 1..26: mol_type = other RNA
aaatataaatataaataaataaatat

SEQ ID NO: 5136 - RNA, 26 nt, synthetic construct
  source 1..26: mol_type = other RNA
aaatataaataaatataaataaatat

SEQ ID NO: 5137 - RNA, 26 nt, synthetic construct
  source 1..26: mol_type = other RNA
aaaaaaaaaaaaaaaaaaaataaata

SEQ ID NO: 5138 - RNA, 26 nt, synthetic construct
  source 1..26: mol_type = other RNA
aaaaaaaaaatataaatataaatata

SEQ ID NO: 5139 - RNA, 26 nt, synthetic construct
  source 1..26: mol_type = other RNA
aaaaaaaaaaaaaaaataaataaata

SEQ ID NO: 5140 - RNA, 26 nt, synthetic construct
  source 1..26: mol_type = other RNA
aaaaaatataaatataaataaatata

SEQ ID NO: 5141 - RNA, 26 nt, synthetic construct
  source 1..26: mol_type = other RNA
aaaaaatataaataaatataaatata

SEQ ID NO: 5142 - RNA, 26 nt, synthetic construct
  source 1..26: mol_type = other RNA
aaaaaataaatataaatataaatata

SEQ ID NO: 5143 - RNA, 26 nt, synthetic construct
  source 1..26: mol_type = other RNA
aaaaaaaaaaaataaataaataaata

SEQ ID NO: 5144 - RNA, 26 nt, synthetic construct
  source 1..26: mol_type = other RNA
aaaaaaaataaataaataaataaata

SEQ ID NO: 5145 - RNA, 26 nt, synthetic construct
  source 1..26: mol_type = other RNA
aaatataaaaaaaaaaaaaaaatata

SEQ ID NO: 5146 - RNA, 26 nt, synthetic construct
  source 1..26: mol_type = other RNA
aaaataaataaataaataaataaata

SEQ ID NO: 5147 - RNA, 26 nt, synthetic construct
  source 1..26: mol_type = other RNA
aaataaaaaaaaaaaatataaatata

SEQ ID NO: 5148 - RNA, 26 nt, synthetic construct
  source 1..26: mol_type = other RNA
aaatataaataaaaaaaaaaaatata

SEQ ID NO: 5149 - RNA, 26 nt, synthetic construct
  source 1..26: mol_type = other RNA
aaatataaaaaaaaaaaataaatata

SEQ ID NO: 5150 - RNA, 26 nt, synthetic construct
  source 1..26: mol_type = other RNA
aaataaatataaaaaaaaaaaatata

SEQ ID NO: 5151 - RNA, 26 nt, synthetic construct
  source 1..26: mol_type = other RNA
aaataaaaaaaataaatataaatata

SEQ ID NO: 5152 - RNA, 26 nt, synthetic construct
  source 1..26: mol_type = other RNA
aaataaataaatataaaaaaaatata

SEQ ID NO: 5153 - RNA, 26 nt, synthetic construct
  source 1..26: mol_type = other RNA
aaatataaataaaaaaaataaatata

SEQ ID NO: 5154 - RNA, 26 nt, synthetic construct
  source 1..26: mol_type = other RNA
aaataaatataaataaaaaaaatata

SEQ ID NO: 5155 - RNA, 26 nt, synthetic construct
  source 1..26: mol_type = other RNA
aaataaatataaaaaaaataaatata

SEQ ID NO: 5156 - RNA, 26 nt, synthetic construct
  source 1..26: mol_type = other RNA
aaataaataaaaaaaatataaatata

SEQ ID NO: 5157 - RNA, 26 nt, synthetic construct
  source 1..26: mol_type = other RNA
aaatataaataaataaaaaaaatata

SEQ ID NO: 5158 - RNA, 26 nt, synthetic construct
  source 1..26: mol_type = other RNA
aaatataaaaaaaataaataaatata

SEQ ID NO: 5159 - RNA, 26 nt, synthetic construct
  source 1..26: mol_type = other RNA
aaataaaaaaaatataaataaatata

SEQ ID NO: 5160 - RNA, 26 nt, synthetic construct
  source 1..26: mol_type = other RNA
aaataaaataaataaatataaatata

SEQ ID NO: 5161 - RNA, 26 nt, synthetic construct
  source 1..26: mol_type = other RNA
aaataaaataaatataaataaatata

SEQ ID NO: 5162 - RNA, 26 nt, synthetic construct
  source 1..26: mol_type = other RNA
aaataaataaataaatataaaatata

SEQ ID NO: 5163 - RNA, 26 nt, synthetic construct
  source 1..26: mol_type = other RNA
aaataaataaatataaataaaatata

SEQ ID NO: 5164 - RNA, 26 nt, synthetic construct
  source 1..26: mol_type = other RNA
aaataaatataaataaataaaatata

SEQ ID NO: 5165 - RNA, 26 nt, synthetic construct
  source 1..26: mol_type = other RNA
aaatataaataaataaataaaatata

SEQ ID NO: 5166 - RNA, 26 nt, synthetic construct
  source 1..26: mol_type = other RNA
aaatataaataaataaaataaatata

SEQ ID NO: 5167 - RNA, 26 nt, synthetic construct
  source 1..26: mol_type = other RNA
aaataaatataaataaaataaatata

SEQ ID NO: 5168 - RNA, 26 nt, synthetic construct
  source 1..26: mol_type = other RNA
aaataaataaataaaatataaatata

SEQ ID NO: 5169 - RNA, 26 nt, synthetic construct
  source 1..26: mol_type = other RNA
aaataaataaatataaaataaatata

SEQ ID NO: 5170 - RNA, 26 nt, synthetic construct
  source 1..26: mol_type = other RNA
aaataaatataaaataaataaatata

SEQ ID NO: 5171 - RNA, 26 nt, synthetic construct
  source 1..26: mol_type = other RNA
aaataaataaaatataaataaatata

SEQ ID NO: 5172 - RNA, 26 nt, synthetic construct
  source 1..26: mol_type = other RNA
aaatataaaataaataaataaatata

SEQ ID NO: 5173 - RNA, 26 nt, synthetic construct
  source 1..26: mol_type = other RNA
aaatataaataaaataaataaatata

SEQ ID NO: 5174 - RNA, 26 nt, synthetic construct
  source 1..26: mol_type = other RNA
aaataaataaaataaatataaatata

SEQ ID NO: 5175 - RNA, 26 nt, synthetic construct
  source 1..26: mol_type = other RNA
aaaaaaaaaaaaaatatataaatata

SEQ ID NO: 5176 - RNA, 26 nt, synthetic construct
  source 1..26: mol_type = other RNA
aaaaaaaaaaaaaatataaatatata

SEQ ID NO: 5177 - RNA, 26 nt, synthetic construct
  source 1..26: mol_type = other RNA
aaataaataaatataaataaatatat

SEQ ID NO: 5178 - RNA, 26 nt, synthetic construct
  source 1..26: mol_type = other RNA
aaataaatataaataaataaatatat

SEQ ID NO: 5179 - RNA, 26 nt, synthetic construct
  source 1..26: mol_type = other RNA
aaataaataaatatataaataaatat

SEQ ID NO: 5180 - RNA, 26 nt, synthetic construct
  source 1..26: mol_type = other RNA
aaataaataaataaatataaatatat

SEQ ID NO: 5181 - RNA, 26 nt, synthetic construct
  source 1..26: mol_type = other RNA
aaatataaataaataaataaatatat

SEQ ID NO: 5182 - RNA, 26 nt, synthetic construct
  source 1..26: mol_type = other RNA
aaataaataaataaatatataaatat

SEQ ID NO: 5183 - RNA, 26 nt, synthetic construct
  source 1..26: mol_type = other RNA
aaataaatatataaataaataaatat

SEQ ID NO: 5184 - RNA, 26 nt, synthetic construct
  source 1..26: mol_type = other RNA
aaatatataaataaataaataaatat

SEQ ID NO: 5185 - RNA, 26 nt, synthetic construct
  source 1..26: mol_type = other RNA
aaaaaaaaaaaaaaaaaaaaatataa

SEQ ID NO: 5186 - RNA, 26 nt, synthetic construct
  source 1..26: mol_type = other RNA
aaaaaaaaaatatataaataaatata

SEQ ID NO: 5187 - RNA, 26 nt, synthetic construct
  source 1..26: mol_type = other RNA
aaaaaaaaaataaatatataaatata

SEQ ID NO: 5188 - RNA, 26 nt, synthetic construct
  source 1..26: mol_type = other RNA
aaaaaaaaaatataaataaatatata

SEQ ID NO: 5189 - RNA, 26 nt, synthetic construct
  source 1..26: mol_type = other RNA
aaaaaaaaaataaatataaatatata

SEQ ID NO: 5190 - RNA, 26 nt, synthetic construct
  source 1..26: mol_type = other RNA
aaaaaaaaaaaaaaaaataaatataa

SEQ ID NO: 5191 - RNA, 26 nt, synthetic construct
  source 1..26: mol_type = other RNA
aaaaaaaaaaaaaaaaatataaataa

SEQ ID NO: 5192 - RNA, 26 nt, synthetic construct
  source 1..26: mol_type = other RNA
aaaaaataaatatataaataaatata

SEQ ID NO: 5193 - RNA, 26 nt, synthetic construct
  source 1..26: mol_type = other RNA
aaaaaatatataaataaataaatata

SEQ ID NO: 5194 - RNA, 26 nt, synthetic construct
  source 1..26: mol_type = other RNA
aaaaaatataaataaataaatatata

SEQ ID NO: 5195 - RNA, 26 nt, synthetic construct
  source 1..26: mol_type = other RNA
aaaaaataaataaatatataaatata

SEQ ID NO: 5196 - RNA, 26 nt, synthetic construct
  source 1..26: mol_type = other RNA
aaaaaataaatataaataaatatata

SEQ ID NO: 5197 - RNA, 26 nt, synthetic construct
  source 1..26: mol_type = other RNA
aaaaaataaataaatataaatatata

SEQ ID NO: 5198 - RNA, 26 nt, synthetic construct
  source 1..26: mol_type = other RNA
aataaataaataaataaataaataaa

SEQ ID NO: 5199 - RNA, 26 nt, synthetic construct
  source 1..26: mol_type = other RNA
aaaaaaaaaaaaataaataaatataa

SEQ ID NO: 5200 - RNA, 26 nt, synthetic construct
  source 1..26: mol_type = other RNA
aaaaaaaaaaaaataaatataaataa

SEQ ID NO: 5201 - RNA, 26 nt, synthetic construct
  source 1..26: mol_type = other RNA
aaaaaaaaaaaaatataaataaataa

SEQ ID NO: 5202 - RNA, 26 nt, synthetic construct
  source 1..26: mol_type = other RNA
aaaaaaaaaaaaaaaaaaaatataaa

SEQ ID NO: 5203 - RNA, 26 nt, synthetic construct
  source 1..26: mol_type = other RNA
aaaaaaaaataaataaataaatataa

SEQ ID NO: 5204 - RNA, 26 nt, synthetic construct
  source 1..26: mol_type = other RNA
aaaaaaaaataaatataaataaataa

SEQ ID NO: 5205 - RNA, 26 nt, synthetic construct
  source 1..26: mol_type = other RNA
aaaaaaaaatataaataaataaataa

SEQ ID NO: 5206 - RNA, 26 nt, synthetic construct
  source 1..26: mol_type = other RNA
aaaaaaaaataaataaatataaataa

SEQ ID NO: 5207 - RNA, 26 nt, synthetic construct
  source 1..26: mol_type = other RNA
aaaaaaaaaaaaaaaataaatataaa

SEQ ID NO: 5208 - RNA, 26 nt, synthetic construct
  source 1..26: mol_type = other RNA
aaaaaaaaaaaaaaaatataaataaa

SEQ ID NO: 5209 - RNA, 26 nt, synthetic construct
  source 1..26: mol_type = other RNA
aaataaaaaaaaaaaaaaaatatata

SEQ ID NO: 5210 - RNA, 26 nt, synthetic construct
  source 1..26: mol_type = other RNA
aaaaataaataaataaataaatataa

SEQ ID NO: 5211 - RNA, 26 nt, synthetic construct
  source 1..26: mol_type = other RNA
aaaaatataaataaataaataaataa

SEQ ID NO: 5212 - RNA, 26 nt, synthetic construct
  source 1..26: mol_type = other RNA
aaaaataaataaataaatataaataa

SEQ ID NO: 5213 - RNA, 26 nt, synthetic construct
  source 1..26: mol_type = other RNA
aaaaataaataaatataaataaataa

SEQ ID NO: 5214 - RNA, 26 nt, synthetic construct
  source 1..26: mol_type = other RNA
aaaaataaatataaataaataaataa

SEQ ID NO: 5215 - RNA, 26 nt, synthetic construct
  source 1..26: mol_type = other RNA
aaataaaaaaaaaaaataaatatata

SEQ ID NO: 5216 - RNA, 26 nt, synthetic construct
  source 1..26: mol_type = other RNA
aaaaaaaaaaaataaatataaataaa

SEQ ID NO: 5217 - RNA, 26 nt, synthetic construct
  source 1..26: mol_type = other RNA
aaataaataaaaaaaaaaaatatata

SEQ ID NO: 5218 - RNA, 26 nt, synthetic construct
  source 1..26: mol_type = other RNA
aaaaaaaaaaaatataaataaataaa

SEQ ID NO: 5219 - RNA, 26 nt, synthetic construct
  source 1..26: mol_type = other RNA
aaaaaaaaaaaataaataaatataaa

SEQ ID NO: 5220 - RNA, 26 nt, synthetic construct
  source 1..26: mol_type = other RNA
aaataaaaaaaaaaaaaaaaaaataa

SEQ ID NO: 5221 - RNA, 26 nt, synthetic construct
  source 1..26: mol_type = other RNA
aaaaaaaataaataaatataaataaa

SEQ ID NO: 5222 - RNA, 26 nt, synthetic construct
  source 1..26: mol_type = other RNA
aaaaaaaataaataaataaatataaa

SEQ ID NO: 5223 - RNA, 26 nt, synthetic construct
  source 1..26: mol_type = other RNA
aaaaaaaataaatataaataaataaa

SEQ ID NO: 5224 - RNA, 26 nt, synthetic construct
  source 1..26: mol_type = other RNA
aaaaaaaatataaataaataaataaa

SEQ ID NO: 5225 - RNA, 26 nt, synthetic construct
  source 1..26: mol_type = other RNA
aaataaaaaaaataaataaatatata

SEQ ID NO: 5226 - RNA, 26 nt, synthetic construct
  source 1..26: mol_type = other RNA
aaataaataaaaaaaataaatatata

SEQ ID NO: 5227 - RNA, 26 nt, synthetic construct
  source 1..26: mol_type = other RNA
aaataaataaataaaaaaaatatata

SEQ ID NO: 5228 - RNA, 26 nt, synthetic construct
  source 1..26: mol_type = other RNA
aaataaaaaaaaaaaaaaataaataa

SEQ ID NO: 5229 - RNA, 26 nt, synthetic construct
  source 1..26: mol_type = other RNA
aaataaataaaaaaaaaaaaaaataa

SEQ ID NO: 5230 - RNA, 26 nt, synthetic construct
  source 1..26: mol_type = other RNA
aaaatataaataaataaataaataaa

SEQ ID NO: 5231 - RNA, 26 nt, synthetic construct
  source 1..26: mol_type = other RNA
aaaataaataaataaatataaataaa

SEQ ID NO: 5232 - RNA, 26 nt, synthetic construct
  source 1..26: mol_type = other RNA
aaaataaataaatataaataaataaa

SEQ ID NO: 5233 - RNA, 26 nt, synthetic construct
  source 1..26: mol_type = other RNA
aaaataaataaataaataaatataaa

SEQ ID NO: 5234 - RNA, 26 nt, synthetic construct
  source 1..26: mol_type = other RNA
aaaataaatataaataaataaataaa

SEQ ID NO: 5235 - RNA, 26 nt, synthetic construct
  source 1..26: mol_type = other RNA
aaataaaataaataaataaatatata

SEQ ID NO: 5236 - RNA, 26 nt, synthetic construct
  source 1..26: mol_type = other RNA
aaataaataaataaaataaatatata

SEQ ID NO: 5237 - RNA, 26 nt, synthetic construct
  source 1..26: mol_type = other RNA
aaataaataaaataaataaatatata

SEQ ID NO: 5238 - RNA, 26 nt, synthetic construct
  source 1..26: mol_type = other RNA
aaataaataaataaataaaatatata

SEQ ID NO: 5239 - RNA, 26 nt, synthetic construct
  source 1..26: mol_type = other RNA
aaaaaaaaaaaaaaaaaatatatata

SEQ ID NO: 5240 - RNA, 26 nt, synthetic construct
  source 1..26: mol_type = other RNA
aaataaataaaaaaaaaaataaataa

SEQ ID NO: 5241 - RNA, 26 nt, synthetic construct
  source 1..26: mol_type = other RNA
aaataaaaaaaaaaataaataaataa

SEQ ID NO: 5242 - RNA, 26 nt, synthetic construct
  source 1..26: mol_type = other RNA
aaataaataaataaaaaaaaaaataa

SEQ ID NO: 5243 - RNA, 26 nt, synthetic construct
  source 1..26: mol_type = other RNA
aaaaaaaaaaaaaataaatatatata

SEQ ID NO: 5244 - RNA, 26 nt, synthetic construct
  source 1..26: mol_type = other RNA
aaataaaaaaaaaaaaaaaaaataaa

SEQ ID NO: 5245 - RNA, 26 nt, synthetic construct
  source 1..26: mol_type = other RNA
aaataaataaataaataaatatatat

SEQ ID NO: 5246 - RNA, 26 nt, synthetic construct
  source 1..26: mol_type = other RNA
aaataaataaaaaaataaataaataa

SEQ ID NO: 5247 - RNA, 26 nt, synthetic construct
  source 1..26: mol_type = other RNA
aaataaataaataaataaaaaaataa

SEQ ID NO: 5248 - RNA, 26 nt, synthetic construct
  source 1..26: mol_type = other RNA
aaataaataaataaaaaaataaataa

SEQ ID NO: 5249 - RNA, 26 nt, synthetic construct
  source 1..26: mol_type = other RNA
aaataaaaaaataaataaataaataa

SEQ ID NO: 5250 - RNA, 26 nt, synthetic construct
  source 1..26: mol_type = other RNA
aaaaaaaaaataaataaatatatata

SEQ ID NO: 5251 - RNA, 26 nt, synthetic construct
  source 1..26: mol_type = other RNA
aaataaaaaaaaaaaaaataaataaa

SEQ ID NO: 5252 - RNA, 26 nt, synthetic construct
  source 1..26: mol_type = other RNA
aaataaataaaaaaaaaaaaaataaa

SEQ ID NO: 5253 - RNA, 26 nt, synthetic construct
  source 1..26: mol_type = other RNA
aaaaaataaataaataaatatatata

SEQ ID NO: 5254 - RNA, 26 nt, synthetic construct
  source 1..26: mol_type = other RNA
aaaaaaaaaaaaaaaaatataaatat

SEQ ID NO: 5255 - RNA, 26 nt, synthetic construct
  source 1..26: mol_type = other RNA
aaataaaaaaaaaataaataaataaa

SEQ ID NO: 5256 - RNA, 26 nt, synthetic construct
  source 1..26: mol_type = other RNA
aaataaataaaaaaaaaataaataaa

SEQ ID NO: 5257 - RNA, 26 nt, synthetic construct
  source 1..26: mol_type = other RNA
aaataaataaataaaaaaaaaataaa

SEQ ID NO: 5258 - RNA, 26 nt, synthetic construct
  source 1..26: mol_type = other RNA
taaataaataaataaatataaatata

SEQ ID NO: 5259 - RNA, 26 nt, synthetic construct
  source 1..26: mol_type = other RNA
taaatataaataaataaataaatata

SEQ ID NO: 5260 - RNA, 26 nt, synthetic construct
  source 1..26: mol_type = other RNA
taaataaataaatataaataaatata

SEQ ID NO: 5261 - RNA, 26 nt, synthetic construct
  source 1..26: mol_type = other RNA
taaataaatataaataaataaatata

SEQ ID NO: 5262 - RNA, 27 nt, synthetic construct
  source 1..27: mol_type = other RNA
aaataaataaataaataaataaatata

SEQ ID NO: 5263 - RNA, 27 nt, synthetic construct
  source 1..27: mol_type = other RNA
aaataaataaataaataaataaataaa

SEQ ID NO: 5264 - RNA, 27 nt, synthetic construct
  source 1..27: mol_type = other RNA
aaaaaaaaaaaaaaaaaaaaaaatata

SEQ ID NO: 5265 - RNA, 27 nt, synthetic construct
  source 1..27: mol_type = other RNA
aaaaaaaaaaaaaaaaaaataaatata

SEQ ID NO: 5266 - RNA, 27 nt, synthetic construct
  source 1..27: mol_type = other RNA
aaaaaaaaaaaaaaataaataaatata

SEQ ID NO: 5267 - RNA, 27 nt, synthetic construct
  source 1..27: mol_type = other RNA
aaaaaaaaaaataaataaataaatata

SEQ ID NO: 5268 - RNA, 27 nt, synthetic construct
  source 1..27: mol_type = other RNA
aaaaaaataaataaataaataaatata

SEQ ID NO: 5269 - RNA, 27 nt, synthetic construct
  source 1..27: mol_type = other RNA
aaataaatataaatataaataaatata

SEQ ID NO: 5270 - RNA, 27 nt, synthetic construct
  source 1..27: mol_type = other RNA
aaataaataaatataaatataaatata

SEQ ID NO: 5271 - RNA, 27 nt, synthetic construct
  source 1..27: mol_type = other RNA
aaatataaataaatataaataaatata

SEQ ID NO: 5272 - RNA, 27 nt, synthetic construct
  source 1..27: mol_type = other RNA
aaatataaataaataaatataaatata

SEQ ID NO: 5273 - RNA, 27 nt, synthetic construct
  source 1..27: mol_type = other RNA
aaataaatataaataaatataaatata

SEQ ID NO: 5274 - RNA, 27 nt, synthetic construct
  source 1..27: mol_type = other RNA
aaataaatataaataaataaatatata

SEQ ID NO: 5275 - RNA, 27 nt, synthetic construct
  source 1..27: mol_type = other RNA
aaataaataaatataaataaatatata

SEQ ID NO: 5276 - RNA, 27 nt, synthetic construct
  source 1..27: mol_type = other RNA
aaataaataaataaatatataaatata

SEQ ID NO: 5277 - RNA, 27 nt, synthetic construct
  source 1..27: mol_type = other RNA
aaataaataaataaatataaatatata

SEQ ID NO: 5278 - RNA, 27 nt, synthetic construct
  source 1..27: mol_type = other RNA
aaataaataaatatataaataaatata

SEQ ID NO: 5279 - RNA, 27 nt, synthetic construct
  source 1..27: mol_type = other RNA
aaataaatatataaataaataaatata

SEQ ID NO: 5280 - RNA, 27 nt, synthetic construct
  source 1..27: mol_type = other RNA
aaatatataaataaataaataaatata

SEQ ID NO: 5281 - RNA, 27 nt, synthetic construct
  source 1..27: mol_type = other RNA
aaatataaataaataaataaatatata

SEQ ID NO: 5282 - RNA, 27 nt, synthetic construct
  source 1..27: mol_type = other RNA
aaataaataaataaataaatatatata

SEQ ID NO: 5283 - RNA, 27 nt, synthetic construct
  source 1..27: mol_type = other RNA
aaaaaaaaaaaaaaaaatataaatata

SEQ ID NO: 5284 - RNA, 27 nt, synthetic construct
  source 1..27: mol_type = other RNA
aaaaaaaaaaaaataaatataaatata

SEQ ID NO: 5285 - RNA, 27 nt, synthetic construct
  source 1..27: mol_type = other RNA
aaaaaaaaaaaaatataaataaatata

SEQ ID NO: 5286 - RNA, 27 nt, synthetic construct
  source 1..27: mol_type = other RNA
aaaaaaaaataaataaatataaatata

SEQ ID NO: 5287 - RNA, 27 nt, synthetic construct
  source 1..27: mol_type = other RNA
aaaaaaaaataaatataaataaatata

SEQ ID NO: 5288 - RNA, 27 nt, synthetic construct
  source 1..27: mol_type = other RNA
aaaaaaaaatataaataaataaatata

SEQ ID NO: 5289 - RNA, 27 nt, synthetic construct
  source 1..27: mol_type = other RNA
aaaaatataaataaataaataaatata

SEQ ID NO: 5290 - RNA, 27 nt, synthetic construct
  source 1..27: mol_type = other RNA
aaaaataaataaataaatataaatata

SEQ ID NO: 5291 - RNA, 27 nt, synthetic construct
  source 1..27: mol_type = other RNA
aaaaataaataaatataaataaatata

SEQ ID NO: 5292 - RNA, 27 nt, synthetic construct
  source 1..27: mol_type = other RNA
aaaaataaatataaataaataaatata

SEQ ID NO: 5293 - RNA, 27 nt, synthetic construct
  source 1..27: mol_type = other RNA
aaataaaaaaaaaaaaaaaaaaatata

SEQ ID NO: 5294 - RNA, 27 nt, synthetic construct
  source 1..27: mol_type = other RNA
aaataaaaaaaaaaaaaaataaatata

SEQ ID NO: 5295 - RNA, 27 nt, synthetic construct
  source 1..27: mol_type = other RNA
aaataaataaaaaaaaaaaaaaatata

SEQ ID NO: 5296 - RNA, 27 nt, synthetic construct
  source 1..27: mol_type = other RNA
aaataaataaaaaaaaaaataaatata

SEQ ID NO: 5297 - RNA, 27 nt, synthetic construct
  source 1..27: mol_type = other RNA
aaataaataaataaaaaaaaaaatata

SEQ ID NO: 5298 - RNA, 27 nt, synthetic construct
  source 1..27: mol_type = other RNA
aaataaaaaaaaaaataaataaatata

SEQ ID NO: 5299 - RNA, 27 nt, synthetic construct
  source 1..27: mol_type = other RNA
aaaaaaaaaaaaaaaaaaaaatatata

SEQ ID NO: 5300 - RNA, 27 nt, synthetic construct
  source 1..27: mol_type = other RNA
aaataaataaataaaaaaataaatata

SEQ ID NO: 5301 - RNA, 27 nt, synthetic construct
  source 1..27: mol_type = other RNA
aaataaataaataaataaaaaaatata

SEQ ID NO: 5302 - RNA, 27 nt, synthetic construct
  source 1..27: mol_type = other RNA
aaataaaaaaataaataaataaatata

SEQ ID NO: 5303 - RNA, 27 nt, synthetic construct
  source 1..27: mol_type = other RNA
aaataaataaaaaaataaataaatata

SEQ ID NO: 5304 - RNA, 27 nt, synthetic construct
  source 1..27: mol_type = other RNA
aaaaaaaaaaaaaaaaataaatatata

SEQ ID NO: 5305 - RNA, 27 nt, synthetic construct
  source 1..27: mol_type = other RNA
aaaaaaaaaaaaaaaaaaaaaaaataa

SEQ ID NO: 5306 - RNA, 27 nt, synthetic construct
  source 1..27: mol_type = other RNA
aaaaaaaaaaaaataaataaatatata

SEQ ID NO: 5307 - RNA, 27 nt, synthetic construct
  source 1..27: mol_type = other RNA
aaaaaaaaaaaaaaaaaaaataaataa

SEQ ID NO: 5308 - RNA, 27 nt, synthetic construct
  source 1..27: mol_type = other RNA
aaaaaaaaataaataaataaatatata

SEQ ID NO: 5309 - RNA, 27 nt, synthetic construct
  source 1..27: mol_type = other RNA
aaaaaaaaaaaaaaaataaataaataa

SEQ ID NO: 5310 - RNA, 27 nt, synthetic construct
  source 1..27: mol_type = other RNA
aaaaataaataaataaataaatatata

SEQ ID NO: 5311 - RNA, 27 nt, synthetic construct
  source 1..27: mol_type = other RNA
aaaaaaaaaaaaaaaaaaaaaaataaa

SEQ ID NO: 5312 - RNA, 27 nt, synthetic construct
  source 1..27: mol_type = other RNA
aaaaaaaaaaaataaataaataaataa

SEQ ID NO: 5313 - RNA, 27 nt, synthetic construct
  source 1..27: mol_type = other RNA
aaaaaaaaaaaaaaaaaaataaataaa

SEQ ID NO: 5314 - RNA, 27 nt, synthetic construct
  source 1..27: mol_type = other RNA
aaaaaaaataaataaataaataaataa

SEQ ID NO: 5315 - RNA, 27 nt, synthetic construct
  source 1..27: mol_type = other RNA
aaaaaaaaaaaaaaataaataaataaa

SEQ ID NO: 5316 - RNA, 27 nt, synthetic construct
  source 1..27: mol_type = other RNA
aaaataaataaataaataaataaataa

SEQ ID NO: 5317 - RNA, 27 nt, synthetic construct
  source 1..27: mol_type = other RNA
aaaaaaaaaaataaataaataaataaa

SEQ ID NO: 5318 - RNA, 27 nt, synthetic construct
  source 1..27: mol_type = other RNA
aaaaaaataaataaataaataaataaa

SEQ ID NO: 5319 - RNA, 27 nt, synthetic construct
  source 1..27: mol_type = other RNA
aaatataaataaataaataaataaata

SEQ ID NO: 5320 - RNA, 27 nt, synthetic construct
  source 1..27: mol_type = other RNA
aaataaatataaataaataaataaata

SEQ ID NO: 5321 - RNA, 27 nt, synthetic construct
  source 1..27: mol_type = other RNA
aaataaataaatataaataaataaata

SEQ ID NO: 5322 - RNA, 27 nt, synthetic construct
  source 1..27: mol_type = other RNA
aaataaataaataaatataaataaata

SEQ ID NO: 5323 - RNA, 27 nt, synthetic construct
  source 1..27: mol_type = other RNA
aaaaaaaaaaaaaaaaaaaaaaaatat

SEQ ID NO: 5324 - RNA, 27 nt, synthetic construct
  source 1..27: mol_type = other RNA
aaaaaaaaaaaaaaaaaaaataaatat

SEQ ID NO: 5325 - RNA, 27 nt, synthetic construct
  source 1..27: mol_type = other RNA
aaaaaaaaaaaaaaaataaataaatat

SEQ ID NO: 5326 - RNA, 27 nt, synthetic construct
  source 1..27: mol_type = other RNA
aaaaaaaaaaaataaataaataaatat

SEQ ID NO: 5327 - RNA, 27 nt, synthetic construct
  source 1..27: mol_type = other RNA
aaaaaaaataaataaataaataaatat

SEQ ID NO: 5328 - RNA, 27 nt, synthetic construct
  source 1..27: mol_type = other RNA
aaaataaataaataaataaataaatat

SEQ ID NO: 5329 - RNA, 27 nt, synthetic construct
  source 1..27: mol_type = other RNA
aaataaataaatataaataaatataaa

SEQ ID NO: 5330 - RNA, 27 nt, synthetic construct
  source 1..27: mol_type = other RNA
aaataaatataaataaataaatataaa

SEQ ID NO: 5331 - RNA, 27 nt, synthetic construct
  source 1..27: mol_type = other RNA
aaatataaataaataaataaatataaa

SEQ ID NO: 5332 - RNA, 27 nt, synthetic construct
  source 1..27: mol_type = other RNA
aaatataaataaatataaataaataaa

SEQ ID NO: 5333 - RNA, 27 nt, synthetic construct
  source 1..27: mol_type = other RNA
aaataaatataaatataaataaataaa

SEQ ID NO: 5334 - RNA, 27 nt, synthetic construct
  source 1..27: mol_type = other RNA
aaatataaataaataaatataaataaa

SEQ ID NO: 5335 - RNA, 27 nt, synthetic construct
  source 1..27: mol_type = other RNA
aaataaatataaataaatataaataaa

SEQ ID NO: 5336 - RNA, 27 nt, synthetic construct
  source 1..27: mol_type = other RNA
aaataaataaatataaatataaataaa

SEQ ID NO: 5337 - RNA, 27 nt, synthetic construct
  source 1..27: mol_type = other RNA
aaataaataaataaatataaatataaa

SEQ ID NO: 5338 - RNA, 27 nt, synthetic construct
  source 1..27: mol_type = other RNA
aaaaaaaaaaaaaaaaaaaaaaaaata

SEQ ID NO: 5339 - RNA, 27 nt, synthetic construct
  source 1..27: mol_type = other RNA
aaaaaaaaaaaaaaaaaaaaataaata

SEQ ID NO: 5340 - RNA, 27 nt, synthetic construct
  source 1..27: mol_type = other RNA
aaaaaaaaaaatataaatataaatata

SEQ ID NO: 5341 - RNA, 27 nt, synthetic construct
  source 1..27: mol_type = other RNA
aaaaaaaaaaaaaaaaataaataaata

SEQ ID NO: 5342 - RNA, 27 nt, synthetic construct
  source 1..27: mol_type = other RNA
aaaaaaataaatataaatataaatata

SEQ ID NO: 5343 - RNA, 27 nt, synthetic construct
  source 1..27: mol_type = other RNA
aaaaaaatataaatataaataaatata

SEQ ID NO: 5344 - RNA, 27 nt, synthetic construct
  source 1..27: mol_type = other RNA
aaaaaaatataaataaatataaatata

SEQ ID NO: 5345 - RNA, 27 nt, synthetic construct
  source 1..27: mol_type = other RNA
aaataaataaatatataaataaataaa

SEQ ID NO: 5346 - RNA, 27 nt, synthetic construct
  source 1..27: mol_type = other RNA
aaataaataaataaataaatatataaa

SEQ ID NO: 5347 - RNA, 27 nt, synthetic construct
  source 1..27: mol_type = other RNA
aaataaataaataaatatataaataaa

SEQ ID NO: 5348 - RNA, 27 nt, synthetic construct
  source 1..27: mol_type = other RNA
aaataaatatataaataaataaataaa

SEQ ID NO: 5349 - RNA, 27 nt, synthetic construct
  source 1..27: mol_type = other RNA
aaaaaaaaaaaaataaataaataaata

SEQ ID NO: 5350 - RNA, 27 nt, synthetic construct
  source 1..27: mol_type = other RNA
aaaaaaaaataaataaataaataaata

SEQ ID NO: 5351 - RNA, 27 nt, synthetic construct
  source 1..27: mol_type = other RNA
aaatataaaaaaaaaaaaaaaaatata

SEQ ID NO: 5352 - RNA, 27 nt, synthetic construct
  source 1..27: mol_type = other RNA
aaaaataaataaataaataaataaata

SEQ ID NO: 5353 - RNA, 27 nt, synthetic construct
  source 1..27: mol_type = other RNA
aaatataaaaaaaaaaaaataaatata

SEQ ID NO: 5354 - RNA, 27 nt, synthetic construct
  source 1..27: mol_type = other RNA
aaataaaaaaaaaaaaatataaatata

SEQ ID NO: 5355 - RNA, 27 nt, synthetic construct
  source 1..27: mol_type = other RNA
aaataaatataaaaaaaaaaaaatata

SEQ ID NO: 5356 - RNA, 27 nt, synthetic construct
  source 1..27: mol_type = other RNA
aaatataaataaaaaaaaaaaaatata

SEQ ID NO: 5357 - RNA, 27 nt, synthetic construct
  source 1..27: mol_type = other RNA
aaataaataaaaaaaaatataaatata

SEQ ID NO: 5358 - RNA, 27 nt, synthetic construct
  source 1..27: mol_type = other RNA
aaataaaaaaaaataaatataaatata

SEQ ID NO: 5359 - RNA, 27 nt, synthetic construct
  source 1..27: mol_type = other RNA
aaatataaaaaaaaataaataaatata

SEQ ID NO: 5360 - RNA, 27 nt, synthetic construct
  source 1..27: mol_type = other RNA
aaataaataaatataaaaaaaaatata

SEQ ID NO: 5361 - RNA, 27 nt, synthetic construct
  source 1..27: mol_type = other RNA
aaataaatataaataaaaaaaaatata

SEQ ID NO: 5362 - RNA, 27 nt, synthetic construct
  source 1..27: mol_type = other RNA
aaataaatataaaaaaaaataaatata

SEQ ID NO: 5363 - RNA, 27 nt, synthetic construct
  source 1..27: mol_type = other RNA
aaatataaataaataaaaaaaaatata

SEQ ID NO: 5364 - RNA, 27 nt, synthetic construct
  source 1..27: mol_type = other RNA
aaataaaaaaaaatataaataaatata

SEQ ID NO: 5365 - RNA, 27 nt, synthetic construct
  source 1..27: mol_type = other RNA
aaatataaataaaaaaaaataaatata

SEQ ID NO: 5366 - RNA, 27 nt, synthetic construct
  source 1..27: mol_type = other RNA
aaataaataaatataaaaataaatata

SEQ ID NO: 5367 - RNA, 27 nt, synthetic construct
  source 1..27: mol_type = other RNA
aaataaatataaataaaaataaatata

SEQ ID NO: 5368 - RNA, 27 nt, synthetic construct
  source 1..27: mol_type = other RNA
aaataaataaataaatataaaaatata

SEQ ID NO: 5369 - RNA, 27 nt, synthetic construct
  source 1..27: mol_type = other RNA
aaataaataaataaaaatataaatata

SEQ ID NO: 5370 - RNA, 27 nt, synthetic construct
  source 1..27: mol_type = other RNA
aaataaataaatataaataaaaatata

SEQ ID NO: 5371 - RNA, 27 nt, synthetic construct
  source 1..27: mol_type = other RNA
aaataaataaaaatataaataaatata

SEQ ID NO: 5372 - RNA, 27 nt, synthetic construct
  source 1..27: mol_type = other RNA
aaataaatataaataaataaaaatata

SEQ ID NO: 5373 - RNA, 27 nt, synthetic construct
  source 1..27: mol_type = other RNA
aaatataaataaaaataaataaatata

SEQ ID NO: 5374 - RNA, 27 nt, synthetic construct
  source 1..27: mol_type = other RNA
aaatataaataaataaataaaaatata

SEQ ID NO: 5375 - RNA, 27 nt, synthetic construct
  source 1..27: mol_type = other RNA
aaatataaataaataaaaataaatata

SEQ ID NO: 5376 - RNA, 27 nt, synthetic construct
  source 1..27: mol_type = other RNA
aaataaaaataaataaatataaatata

SEQ ID NO: 5377 - RNA, 27 nt, synthetic construct
  source 1..27: mol_type = other RNA
aaataaaaataaatataaataaatata

SEQ ID NO: 5378 - RNA, 27 nt, synthetic construct
  source 1..27: mol_type = other RNA
aaataaataaaaataaatataaatata

SEQ ID NO: 5379 - RNA, 27 nt, synthetic construct
  source 1..27: mol_type = other RNA
aaataaatataaaaataaataaatata

SEQ ID NO: 5380 - RNA, 27 nt, synthetic construct
  source 1..27: mol_type = other RNA
aaatataaaaataaataaataaatata

SEQ ID NO: 5381 - RNA, 27 nt, synthetic construct
  source 1..27: mol_type = other RNA
aaaaaaaaaaaaaaatatataaatata

SEQ ID NO: 5382 - RNA, 27 nt, synthetic construct
  source 1..27: mol_type = other RNA
aaaaaaaaaaaaaaatataaatatata

SEQ ID NO: 5383 - RNA, 27 nt, synthetic construct
  source 1..27: mol_type = other RNA
aaaaaaaaaaaaaaaaaaaaaatataa

SEQ ID NO: 5384 - RNA, 27 nt, synthetic construct
  source 1..27: mol_type = other RNA
aaaaaaaaaaatatataaataaatata

SEQ ID NO: 5385 - RNA, 27 nt, synthetic construct
  source 1..27: mol_type = other RNA
aaaaaaaaaaataaatataaatatata

SEQ ID NO: 5386 - RNA, 27 nt, synthetic construct
  source 1..27: mol_type = other RNA
aaaaaaaaaaatataaataaatatata

SEQ ID NO: 5387 - RNA, 27 nt, synthetic construct
  source 1..27: mol_type = other RNA
aaaaaaaaaaataaatatataaatata

SEQ ID NO: 5388 - RNA, 27 nt, synthetic construct
  source 1..27: mol_type = other RNA
aaaaaaaaaaaaaaaaaataaatataa

SEQ ID NO: 5389 - RNA, 27 nt, synthetic construct
  source 1..27: mol_type = other RNA
aaaaaaaaaaaaaaaaaatataaataa

SEQ ID NO: 5390 - RNA, 27 nt, synthetic construct
  source 1..27: mol_type = other RNA
aaaaaaataaatatataaataaatata

SEQ ID NO: 5391 - RNA, 27 nt, synthetic construct
  source 1..27: mol_type = other RNA
aaaaaaataaatataaataaatatata

SEQ ID NO: 5392 - RNA, 27 nt, synthetic construct
  source 1..27: mol_type = other RNA
aaaaaaataaataaatataaatatata

SEQ ID NO: 5393 - RNA, 27 nt, synthetic construct
  source 1..27: mol_type = other RNA
aaaaaaataaataaatatataaatata

SEQ ID NO: 5394 - RNA, 27 nt, synthetic construct
  source 1..27: mol_type = other RNA
aaaaaaatataaataaataaatatata

SEQ ID NO: 5395 - RNA, 27 nt, synthetic construct
  source 1..27: mol_type = other RNA
aaaaaaatatataaataaataaatata

SEQ ID NO: 5396 - RNA, 27 nt, synthetic construct
  source 1..27: mol_type = other RNA
aaaaaaaaaaaaaataaataaatataa

SEQ ID NO: 5397 - RNA, 27 nt, synthetic construct
  source 1..27: mol_type = other RNA
aaaaaaaaaaaaaataaatataaataa

SEQ ID NO: 5398 - RNA, 27 nt, synthetic construct
  source 1..27: mol_type = other RNA
aaaaaaaaaaaaaatataaataaataa

SEQ ID NO: 5399 - RNA, 27 nt, synthetic construct
  source 1..27: mol_type = other RNA
aaaaaaaaaaaaaaaaaaaaatataaa

SEQ ID NO: 5400 - RNA, 27 nt, synthetic construct
  source 1..27: mol_type = other RNA
aaaaaaaaaataaataaataaatataa

SEQ ID NO: 5401 - RNA, 27 nt, synthetic construct
  source 1..27: mol_type = other RNA
aaaaaaaaaataaataaatataaataa

SEQ ID NO: 5402 - RNA, 27 nt, synthetic construct
  source 1..27: mol_type = other RNA
aaaaaaaaaatataaataaataaataa

SEQ ID NO: 5403 - RNA, 27 nt, synthetic construct
  source 1..27: mol_type = other RNA
aaaaaaaaaataaatataaataaataa

SEQ ID NO: 5404 - RNA, 27 nt, synthetic construct
  source 1..27: mol_type = other RNA
aaataaataaataaataaataaatatt

SEQ ID NO: 5405 - RNA, 27 nt, synthetic construct
  source 1..27: mol_type = other RNA
aaaaaaaaaaaaaaaaatataaataaa

SEQ ID NO: 5406 - RNA, 27 nt, synthetic construct
  source 1..27: mol_type = other RNA
aaaaaaaaaaaaaaaaataaatataaa

SEQ ID NO: 5407 - RNA, 27 nt, synthetic construct
  source 1..27: mol_type = other RNA
aaataaaaaaaaaaaaaaaaatatata

SEQ ID NO: 5408 - RNA, 27 nt, synthetic construct
  source 1..27: mol_type = other RNA
aaaaaataaataaataaataaatataa

SEQ ID NO: 5409 - RNA, 27 nt, synthetic construct
  source 1..27: mol_type = other RNA
aaaaaataaataaataaatataaataa

SEQ ID NO: 5410 - RNA, 27 nt, synthetic construct
  source 1..27: mol_type = other RNA
aaaaaatataaataaataaataaataa

SEQ ID NO: 5411 - RNA, 27 nt, synthetic construct
  source 1..27: mol_type = other RNA
aaaaaataaatataaataaataaataa

SEQ ID NO: 5412 - RNA, 27 nt, synthetic construct
  source 1..27: mol_type = other RNA
aaaaaataaataaatataaataaataa

SEQ ID NO: 5413 - RNA, 27 nt, synthetic construct
  source 1..27: mol_type = other RNA
atataaataaataaataaataaatata

SEQ ID NO: 5414 - RNA, 27 nt, synthetic construct
  source 1..27: mol_type = other RNA
aaaaaaaaaaaaataaatataaataaa

SEQ ID NO: 5415 - RNA, 27 nt, synthetic construct
  source 1..27: mol_type = other RNA
aaaaaaaaaaaaatataaataaataaa

SEQ ID NO: 5416 - RNA, 27 nt, synthetic construct
  source 1..27: mol_type = other RNA
aaaaaaaaaaaaataaataaatataaa

SEQ ID NO: 5417 - RNA, 27 nt, synthetic construct
  source 1..27: mol_type = other RNA
aaataaaaaaaaaaaaataaatatata

SEQ ID NO: 5418 - RNA, 27 nt, synthetic construct
  source 1..27: mol_type = other RNA
aaataaataaaaaaaaaaaaatatata

SEQ ID NO: 5419 - RNA, 27 nt, synthetic construct
  source 1..27: mol_type = other RNA
aaataaaaaaaaaaaaaaaaaaaataa

SEQ ID NO: 5420 - RNA, 27 nt, synthetic construct
  source 1..27: mol_type = other RNA
aaataaaaaaaaataaataaatatata

SEQ ID NO: 5421 - RNA, 27 nt, synthetic construct
  source 1..27: mol_type = other RNA
aaataaataaaaaaaaataaatatata

SEQ ID NO: 5422 - RNA, 27 nt, synthetic construct
  source 1..27: mol_type = other RNA
aaaaaaaaataaataaatataaataaa

SEQ ID NO: 5423 - RNA, 27 nt, synthetic construct
  source 1..27: mol_type = other RNA
aaataaataaataaaaaaaaatatata

SEQ ID NO: 5424 - RNA, 27 nt, synthetic construct
  source 1..27: mol_type = other RNA
aaaaaaaaataaatataaataaataaa

SEQ ID NO: 5425 - RNA, 27 nt, synthetic construct
  source 1..27: mol_type = other RNA
aaaaaaaaataaataaataaatataaa

SEQ ID NO: 5426 - RNA, 27 nt, synthetic construct
  source 1..27: mol_type = other RNA
aaaaaaaaatataaataaataaataaa

SEQ ID NO: 5427 - RNA, 27 nt, synthetic construct
  source 1..27: mol_type = other RNA
aaataaataaaaaaaaaaaaaaaataa

SEQ ID NO: 5428 - RNA, 27 nt, synthetic construct
  source 1..27: mol_type = other RNA
aaataaaaaaaaaaaaaaaataaataa

SEQ ID NO: 5429 - RNA, 27 nt, synthetic construct
  source 1..27: mol_type = other RNA
aaaaatataaataaataaataaataaa

SEQ ID NO: 5430 - RNA, 27 nt, synthetic construct
  source 1..27: mol_type = other RNA
aaaaataaataaatataaataaataaa

SEQ ID NO: 5431 - RNA, 27 nt, synthetic construct
  source 1..27: mol_type = other RNA
aaaaataaataaataaatataaataaa

SEQ ID NO: 5432 - RNA, 27 nt, synthetic construct
  source 1..27: mol_type = other RNA
aaaaataaataaataaataaatataaa

SEQ ID NO: 5433 - RNA, 27 nt, synthetic construct
  source 1..27: mol_type = other RNA
aaaaataaatataaataaataaataaa

SEQ ID NO: 5434 - RNA, 27 nt, synthetic construct
  source 1..27: mol_type = other RNA
aaataaataaataaaaataaatatata

SEQ ID NO: 5435 - RNA, 27 nt, synthetic construct
  source 1..27: mol_type = other RNA
aaataaataaataaataaaaatatata

SEQ ID NO: 5436 - RNA, 27 nt, synthetic construct
  source 1..27: mol_type = other RNA
aaataaaaataaataaataaatatata

SEQ ID NO: 5437 - RNA, 27 nt, synthetic construct
  source 1..27: mol_type = other RNA
aaataaataaaaataaataaatatata

SEQ ID NO: 5438 - RNA, 27 nt, synthetic construct
  source 1..27: mol_type = other RNA
aaaaaaaaaaaaaaaaaaatatatata

SEQ ID NO: 5439 - RNA, 27 nt, synthetic construct
  source 1..27: mol_type = other RNA
aaataaataaataaaaaaaaaaaataa

SEQ ID NO: 5440 - RNA, 27 nt, synthetic construct
  source 1..27: mol_type = other RNA
aaataaataaaaaaaaaaaataaataa

SEQ ID NO: 5441 - RNA, 27 nt, synthetic construct
  source 1..27: mol_type = other RNA
aaataaaaaaaaaaaataaataaataa

SEQ ID NO: 5442 - RNA, 27 nt, synthetic construct
  source 1..27: mol_type = other RNA
aaaaaaaaaaaaaaataaatatatata

SEQ ID NO: 5443 - RNA, 27 nt, synthetic construct
  source 1..27: mol_type = other RNA
aaataaaaaaaaaaaaaaaaaaataaa

SEQ ID NO: 5444 - RNA, 27 nt, synthetic construct
  source 1..27: mol_type = other RNA
aaataaataaataaataaaaaaaataa

SEQ ID NO: 5445 - RNA, 27 nt, synthetic construct
  source 1..27: mol_type = other RNA
aaataaataaataaaaaaaataaataa

SEQ ID NO: 5446 - RNA, 27 nt, synthetic construct
  source 1..27: mol_type = other RNA
aaataaaaaaaataaataaataaataa

SEQ ID NO: 5447 - RNA, 27 nt, synthetic construct
  source 1..27: mol_type = other RNA
aaataaataaaaaaaataaataaataa

SEQ ID NO: 5448 - RNA, 27 nt, synthetic construct
  source 1..27: mol_type = other RNA
aaaaaaaaaaataaataaatatatata

SEQ ID NO: 5449 - RNA, 27 nt, synthetic construct
  source 1..27: mol_type = other RNA
aaataaataaaaaaaaaaaaaaataaa

SEQ ID NO: 5450 - RNA, 27 nt, synthetic construct
  source 1..27: mol_type = other RNA
aaataaaaaaaaaaaaaaataaataaa

SEQ ID NO: 5451 - RNA, 27 nt, synthetic construct
  source 1..27: mol_type = other RNA
aaataaataaataaataaaataaataa

SEQ ID NO: 5452 - RNA, 27 nt, synthetic construct
  source 1..27: mol_type = other RNA
aaataaaataaataaataaataaataa

SEQ ID NO: 5453 - RNA, 27 nt, synthetic construct
  source 1..27: mol_type = other RNA
aaataaataaataaaataaataaataa

SEQ ID NO: 5454 - RNA, 27 nt, synthetic construct
  source 1..27: mol_type = other RNA
aaataaataaaataaataaataaataa

SEQ ID NO: 5455 - RNA, 27 nt, synthetic construct
  source 1..27: mol_type = other RNA
aaataaataaataaataaataaaataa

SEQ ID NO: 5456 - RNA, 27 nt, synthetic construct
  source 1..27: mol_type = other RNA
aaaaaaataaataaataaatatatata

SEQ ID NO: 5457 - RNA, 27 nt, synthetic construct
  source 1..27: mol_type = other RNA
aaaaaaaaaaaaaaaaaatataaatat

SEQ ID NO: 5458 - RNA, 27 nt, synthetic construct
  source 1..27: mol_type = other RNA
aaataaataaaaaaaaaaataaataaa

SEQ ID NO: 5459 - RNA, 27 nt, synthetic construct
  source 1..27: mol_type = other RNA
aaataaataaataaaaaaaaaaataaa

SEQ ID NO: 5460 - RNA, 27 nt, synthetic construct
  source 1..27: mol_type = other RNA
aaataaaaaaaaaaataaataaataaa

SEQ ID NO: 5461 - RNA, 27 nt, synthetic construct
  source 1..27: mol_type = other RNA
aaaaaaaaaaaaaatataaataaatat

SEQ ID NO: 5462 - RNA, 27 nt, synthetic construct
  source 1..27: mol_type = other RNA
aaaaaaaaaaaaaataaatataaatat

SEQ ID NO: 5463 - RNA, 28 nt, synthetic construct
  source 1..28: mol_type = other RNA
aaaaaaaaaaaaaaaaaaaaaaaatata

SEQ ID NO: 5464 - RNA, 28 nt, synthetic construct
  source 1..28: mol_type = other RNA
aaaaaaaaaaaaaaaaaaaataaatata

SEQ ID NO: 5465 - RNA, 28 nt, synthetic construct
  source 1..28: mol_type = other RNA
aaaaaaaaaaaaaaaataaataaatata

SEQ ID NO: 5466 - RNA, 28 nt, synthetic construct
  source 1..28: mol_type = other RNA
aaaaaaaaaaaataaataaataaatata

SEQ ID NO: 5467 - RNA, 28 nt, synthetic construct
  source 1..28: mol_type = other RNA
aaaaaaaataaataaataaataaatata

SEQ ID NO: 5468 - RNA, 28 nt, synthetic construct
  source 1..28: mol_type = other RNA
aaaataaataaataaataaataaatata

SEQ ID NO: 5469 - RNA, 28 nt, synthetic construct
  source 1..28: mol_type = other RNA
aaatataaataaataaataaataaataa

SEQ ID NO: 5470 - RNA, 28 nt, synthetic construct
  source 1..28: mol_type = other RNA
aaataaatataaataaataaataaataa

SEQ ID NO: 5471 - RNA, 28 nt, synthetic construct
  source 1..28: mol_type = other RNA
aaataaataaatataaataaataaataa

SEQ ID NO: 5472 - RNA, 28 nt, synthetic construct
  source 1..28: mol_type = other RNA
aaataaataaataaataaatataaataa

SEQ ID NO: 5473 - RNA, 28 nt, synthetic construct
  source 1..28: mol_type = other RNA
aaataaataaataaatataaataaataa

SEQ ID NO: 5474 - RNA, 28 nt, synthetic construct
  source 1..28: mol_type = other RNA
aaataaataaataaataaataaatataa

SEQ ID NO: 5475 - RNA, 28 nt, synthetic construct
  source 1..28: mol_type = other RNA
aaaaaaaaaaaaaaaaaatataaatata

SEQ ID NO: 5476 - RNA, 28 nt, synthetic construct
  source 1..28: mol_type = other RNA
aaaaaaaaaaaaaatataaataaatata

SEQ ID NO: 5477 - RNA, 28 nt, synthetic construct
  source 1..28: mol_type = other RNA
aaaaaaaaaaaaaataaatataaatata

SEQ ID NO: 5478 - RNA, 28 nt, synthetic construct
  source 1..28: mol_type = other RNA
aaataaatataaataaataaataaatat

SEQ ID NO: 5479 - RNA, 28 nt, synthetic construct
  source 1..28: mol_type = other RNA
aaataaataaatataaataaataaatat

SEQ ID NO: 5480 - RNA, 28 nt, synthetic construct
  source 1..28: mol_type = other RNA
aaatataaataaataaataaataaatat

SEQ ID NO: 5481 - RNA, 28 nt, synthetic construct
  source 1..28: mol_type = other RNA
aaataaataaataaataaatataaatat

SEQ ID NO: 5482 - RNA, 28 nt, synthetic construct
  source 1..28: mol_type = other RNA
aaataaataaataaatataaataaatat

SEQ ID NO: 5483 - RNA, 28 nt, synthetic construct
  source 1..28: mol_type = other RNA
aaaaaaaaaataaatataaataaatata

SEQ ID NO: 5484 - RNA, 28 nt, synthetic construct
  source 1..28: mol_type = other RNA
aaaaaaaaaatataaataaataaatata

SEQ ID NO: 5485 - RNA, 28 nt, synthetic construct
  source 1..28: mol_type = other RNA
aaaaaaaaaataaataaatataaatata

SEQ ID NO: 5486 - RNA, 28 nt, synthetic construct
  source 1..28: mol_type = other RNA
aaaaaataaatataaataaataaatata

SEQ ID NO: 5487 - RNA, 28 nt, synthetic construct
  source 1..28: mol_type = other RNA
aaaaaatataaataaataaataaatata

SEQ ID NO: 5488 - RNA, 28 nt, synthetic construct
  source 1..28: mol_type = other RNA
aaaaaataaataaataaatataaatata

SEQ ID NO: 5489 - RNA, 28 nt, synthetic construct
  source 1..28: mol_type = other RNA
aaaaaataaataaatataaataaatata

SEQ ID NO: 5490 - RNA, 28 nt, synthetic construct
  source 1..28: mol_type = other RNA
aaataaaaaaaaaaaaaaaaaaaatata

SEQ ID NO: 5491 - RNA, 28 nt, synthetic construct
  source 1..28: mol_type = other RNA
aaataaataaaaaaaaaaaaaaaatata

SEQ ID NO: 5492 - RNA, 28 nt, synthetic construct
  source 1..28: mol_type = other RNA
aaataaaaaaaaaaaaaaaataaatata

SEQ ID NO: 5493 - RNA, 28 nt, synthetic construct
  source 1..28: mol_type = other RNA
aaataaataaataaaaaaaaaaaatata

SEQ ID NO: 5494 - RNA, 28 nt, synthetic construct
  source 1..28: mol_type = other RNA
aaataaaaaaaaaaaataaataaatata

SEQ ID NO: 5495 - RNA, 28 nt, synthetic construct
  source 1..28: mol_type = other RNA
aaataaataaaaaaaaaaaataaatata

SEQ ID NO: 5496 - RNA, 28 nt, synthetic construct
  source 1..28: mol_type = other RNA
aaataaataaataaataaaaaaaatata

SEQ ID NO: 5497 - RNA, 28 nt, synthetic construct
  source 1..28: mol_type = other RNA
aaataaataaaaaaaataaataaatata

SEQ ID NO: 5498 - RNA, 28 nt, synthetic construct
  source 1..28: mol_type = other RNA
aaataaaaaaaataaataaataaatata

SEQ ID NO: 5499 - RNA, 28 nt, synthetic construct
  source 1..28: mol_type = other RNA
aaataaataaataaaaaaaataaatata

SEQ ID NO: 5500 - RNA, 28 nt, synthetic construct
  source 1..28: mol_type = other RNA
aaaaaaaaaaaaaaaaaaaaaatatata

SEQ ID NO: 5501 - RNA, 28 nt, synthetic construct
  source 1..28: mol_type = other RNA
aaataaaataaataaataaataaatata

SEQ ID NO: 5502 - RNA, 28 nt, synthetic construct
  source 1..28: mol_type = other RNA
aaataaataaaataaataaataaatata

SEQ ID NO: 5503 - RNA, 28 nt, synthetic construct
  source 1..28: mol_type = other RNA
aaataaataaataaataaataaaatata

SEQ ID NO: 5504 - RNA, 28 nt, synthetic construct
  source 1..28: mol_type = other RNA
aaataaataaataaataaaataaatata

SEQ ID NO: 5505 - RNA, 28 nt, synthetic construct
  source 1..28: mol_type = other RNA
aaataaataaataaaataaataaatata

SEQ ID NO: 5506 - RNA, 28 nt, synthetic construct
  source 1..28: mol_type = other RNA
aaaaaaaaaaaaaaaaaataaatatata

SEQ ID NO: 5507 - RNA, 28 nt, synthetic construct
  source 1..28: mol_type = other RNA
aaaaaaaaaaaaaaaaaaaaaaaaataa

SEQ ID NO: 5508 - RNA, 28 nt, synthetic construct
  source 1..28: mol_type = other RNA
aaaaaaaaaaaaaataaataaatatata

SEQ ID NO: 5509 - RNA, 28 nt, synthetic construct
  source 1..28: mol_type = other RNA
aaataaataaataaataaataaatatat

SEQ ID NO: 5510 - RNA, 28 nt, synthetic construct
  source 1..28: mol_type = other RNA
aaaaaaaaaaaaaaaaaaaaataaataa

SEQ ID NO: 5511 - RNA, 28 nt, synthetic construct
  source 1..28: mol_type = other RNA
aaaaaaaaaataaataaataaatatata

SEQ ID NO: 5512 - RNA, 28 nt, synthetic construct
  source 1..28: mol_type = other RNA
aaaaaaaaaaaaaaaaataaataaataa

SEQ ID NO: 5513 - RNA, 28 nt, synthetic construct
  source 1..28: mol_type = other RNA
aaaaaataaataaataaataaatatata

SEQ ID NO: 5514 - RNA, 28 nt, synthetic construct
  source 1..28: mol_type = other RNA
aaaaaaaaaaaaaaaaaaaaaaaataaa

SEQ ID NO: 5515 - RNA, 28 nt, synthetic construct
  source 1..28: mol_type = other RNA
aaaaaaaaaaaaataaataaataaataa

SEQ ID NO: 5516 - RNA, 28 nt, synthetic construct
  source 1..28: mol_type = other RNA
aaaaaaaaaaaaaaaaaaaataaataaa

SEQ ID NO: 5517 - RNA, 28 nt, synthetic construct
  source 1..28: mol_type = other RNA
aaaaaaaaataaataaataaataaataa

SEQ ID NO: 5518 - RNA, 28 nt, synthetic construct
  source 1..28: mol_type = other RNA
aaaaaaaaaaaaaaaataaataaataaa

SEQ ID NO: 5519 - RNA, 28 nt, synthetic construct
  source 1..28: mol_type = other RNA
aaaaataaataaataaataaataaataa

SEQ ID NO: 5520 - RNA, 28 nt, synthetic construct
  source 1..28: mol_type = other RNA
aaaaaaaaaaaataaataaataaataaa

SEQ ID NO: 5521 - RNA, 28 nt, synthetic construct
  source 1..28: mol_type = other RNA
aaaaaaaataaataaataaataaataaa

SEQ ID NO: 5522 - RNA, 28 nt, synthetic construct
  source 1..28: mol_type = other RNA
aaaataaataaataaataaataaataaa

SEQ ID NO: 5523 - RNA, 28 nt, synthetic construct
  source 1..28: mol_type = other RNA
aaaaaaaaaaaaaaaaaaaaaaaaatat

SEQ ID NO: 5524 - RNA, 28 nt, synthetic construct
  source 1..28: mol_type = other RNA
aaaaaaaaaaaaaaaaaaaaataaatat

SEQ ID NO: 5525 - RNA, 28 nt, synthetic construct
  source 1..28: mol_type = other RNA
aaaaaaaaaaaaaaaaataaataaatat

SEQ ID NO: 5526 - RNA, 28 nt, synthetic construct
  source 1..28: mol_type = other RNA
taaataaataaataaataaataaatata

SEQ ID NO: 5527 - RNA, 28 nt, synthetic construct
  source 1..28: mol_type = other RNA
aaaaaaaaaaaaataaataaataaatat

SEQ ID NO: 5528 - RNA, 28 nt, synthetic construct
  source 1..28: mol_type = other RNA
aaaaaaaaataaataaataaataaatat

SEQ ID NO: 5529 - RNA, 28 nt, synthetic construct
  source 1..28: mol_type = other RNA
aaaaataaataaataaataaataaatat

SEQ ID NO: 5530 - RNA, 28 nt, synthetic construct
  source 1..28: mol_type = other RNA
aatataaataaataaataaataaatata

SEQ ID NO: 5531 - RNA, 28 nt, synthetic construct
  source 1..28: mol_type = other RNA
aataaatataaataaataaataaatata

SEQ ID NO: 5532 - RNA, 28 nt, synthetic construct
  source 1..28: mol_type = other RNA
aataaataaataaatataaataaatata

SEQ ID NO: 5533 - RNA, 28 nt, synthetic construct
  source 1..28: mol_type = other RNA
aataaataaataaataaatataaatata

SEQ ID NO: 5534 - RNA, 28 nt, synthetic construct
  source 1..28: mol_type = other RNA
aaaaaaaaaaaaaaaaaaaaaaaaaata

SEQ ID NO: 5535 - RNA, 28 nt, synthetic construct
  source 1..28: mol_type = other RNA
aaaaaaaaaaaaaaaaaaaaaataaata

SEQ ID NO: 5536 - RNA, 28 nt, synthetic construct
  source 1..28: mol_type = other RNA
aaaaaaaaaaaatataaatataaatata

SEQ ID NO: 5537 - RNA, 28 nt, synthetic construct
  source 1..28: mol_type = other RNA
aaaaaaaaaaaaaaaaaataaataaata

SEQ ID NO: 5538 - RNA, 28 nt, synthetic construct
  source 1..28: mol_type = other RNA
aaaaaaaatataaatataaataaatata

SEQ ID NO: 5539 - RNA, 28 nt, synthetic construct
  source 1..28: mol_type = other RNA
aaaaaaaatataaataaatataaatata

SEQ ID NO: 5540 - RNA, 28 nt, synthetic construct
  source 1..28: mol_type = other RNA
aaaaaaaataaatataaatataaatata

SEQ ID NO: 5541 - RNA, 28 nt, synthetic construct
  source 1..28: mol_type = other RNA
aaaaaaaaaaaaaataaataaataaata

SEQ ID NO: 5542 - RNA, 28 nt, synthetic construct
  source 1..28: mol_type = other RNA
aaaataaatataaatataaataaatata

SEQ ID NO: 5543 - RNA, 28 nt, synthetic construct
  source 1..28: mol_type = other RNA
aaaataaataaatataaatataaatata

SEQ ID NO: 5544 - RNA, 28 nt, synthetic construct
  source 1..28: mol_type = other RNA
aaaataaatataaataaatataaatata

SEQ ID NO: 5545 - RNA, 28 nt, synthetic construct
  source 1..28: mol_type = other RNA
aaaatataaataaataaatataaatata

SEQ ID NO: 5546 - RNA, 28 nt, synthetic construct
  source 1..28: mol_type = other RNA
aaaatataaatataaataaataaatata

SEQ ID NO: 5547 - RNA, 28 nt, synthetic construct
  source 1..28: mol_type = other RNA
aaaatataaataaatataaataaatata

SEQ ID NO: 5548 - RNA, 28 nt, synthetic construct
  source 1..28: mol_type = other RNA
aaaaaaaaaataaataaataaataaata

SEQ ID NO: 5549 - RNA, 28 nt, synthetic construct
  source 1..28: mol_type = other RNA
aaatataaaaaaaaaaaaaaaaaatata

SEQ ID NO: 5550 - RNA, 28 nt, synthetic construct
  source 1..28: mol_type = other RNA
aaaaaataaataaataaataaataaata

SEQ ID NO: 5551 - RNA, 28 nt, synthetic construct
  source 1..28: mol_type = other RNA
aaataaatataaaaaaaaaaaaaatata

SEQ ID NO: 5552 - RNA, 28 nt, synthetic construct
  source 1..28: mol_type = other RNA
aaataaaaaaaaaaaaaatataaatata

SEQ ID NO: 5553 - RNA, 28 nt, synthetic construct
  source 1..28: mol_type = other RNA
aaatataaaaaaaaaaaaaataaatata

SEQ ID NO: 5554 - RNA, 28 nt, synthetic construct
  source 1..28: mol_type = other RNA
aaatataaataaaaaaaaaaaaaatata

SEQ ID NO: 5555 - RNA, 28 nt, synthetic construct
  source 1..28: mol_type = other RNA
aaataaatataaataaaaaaaaaatata

SEQ ID NO: 5556 - RNA, 28 nt, synthetic construct
  source 1..28: mol_type = other RNA
aaataaataaatataaaaaaaaaatata

SEQ ID NO: 5557 - RNA, 28 nt, synthetic construct
  source 1..28: mol_type = other RNA
aaatataaataaataaaaaaaaaatata

SEQ ID NO: 5558 - RNA, 28 nt, synthetic construct
  source 1..28: mol_type = other RNA
aaataaaaaaaaaatataaataaatata

SEQ ID NO: 5559 - RNA, 28 nt, synthetic construct
  source 1..28: mol_type = other RNA
aaataaataaaaaaaaaatataaatata

SEQ ID NO: 5560 - RNA, 28 nt, synthetic construct
  source 1..28: mol_type = other RNA
aaataaaaaaaaaataaatataaatata

SEQ ID NO: 5561 - RNA, 28 nt, synthetic construct
  source 1..28: mol_type = other RNA
aaataaatataaaaaaaaaataaatata

SEQ ID NO: 5562 - RNA, 28 nt, synthetic construct
  source 1..28: mol_type = other RNA
aaatataaaaaaaaaataaataaatata

SEQ ID NO: 5563 - RNA, 28 nt, synthetic construct
  source 1..28: mol_type = other RNA
aaatataaataaaaaaaaaataaatata

SEQ ID NO: 5564 - RNA, 28 nt, synthetic construct
  source 1..28: mol_type = other RNA
aataaataaataaataaataaatatata

SEQ ID NO: 5565 - RNA, 28 nt, synthetic construct
  source 1..28: mol_type = other RNA
aaataaataaatataaataaaaaatata

SEQ ID NO: 5566 - RNA, 28 nt, synthetic construct
  source 1..28: mol_type = other RNA
aaataaatataaataaataaaaaatata

SEQ ID NO: 5567 - RNA, 28 nt, synthetic construct
  source 1..28: mol_type = other RNA
aaatataaataaataaataaaaaatata

SEQ ID NO: 5568 - RNA, 28 nt, synthetic construct
  source 1..28: mol_type = other RNA
aaatataaataaataaaaaataaatata

SEQ ID NO: 5569 - RNA, 28 nt, synthetic construct
  source 1..28: mol_type = other RNA
aaataaaaaataaatataaataaatata

SEQ ID NO: 5570 - RNA, 28 nt, synthetic construct
  source 1..28: mol_type = other RNA
aaataaataaaaaatataaataaatata

SEQ ID NO: 5571 - RNA, 28 nt, synthetic construct
  source 1..28: mol_type = other RNA
aaataaaaaataaataaatataaatata

SEQ ID NO: 5572 - RNA, 28 nt, synthetic construct
  source 1..28: mol_type = other RNA
aaataaaaaatataaataaataaatata

SEQ ID NO: 5573 - RNA, 28 nt, synthetic construct
  source 1..28: mol_type = other RNA
aaataaataaaaaataaatataaatata

SEQ ID NO: 5574 - RNA, 28 nt, synthetic construct
  source 1..28: mol_type = other RNA
aaataaataaataaatataaaaaatata

SEQ ID NO: 5575 - RNA, 28 nt, synthetic construct
  source 1..28: mol_type = other RNA
aaataaataaataaaaaatataaatata

SEQ ID NO: 5576 - RNA, 28 nt, synthetic construct
  source 1..28: mol_type = other RNA
aaataaataaatataaaaaataaatata

SEQ ID NO: 5577 - RNA, 28 nt, synthetic construct
  source 1..28: mol_type = other RNA
aaataaatataaaaaataaataaatata

SEQ ID NO: 5578 - RNA, 28 nt, synthetic construct
  source 1..28: mol_type = other RNA
aaatataaaaaataaataaataaatata

SEQ ID NO: 5579 - RNA, 28 nt, synthetic construct
  source 1..28: mol_type = other RNA
aaataaatataaataaaaaataaatata

SEQ ID NO: 5580 - RNA, 28 nt, synthetic construct
  source 1..28: mol_type = other RNA
aaatataaataaaaaataaataaatata

SEQ ID NO: 5581 - RNA, 28 nt, synthetic construct
  source 1..28: mol_type = other RNA
aaaaaaaaaaaaaaaatatataaatata

SEQ ID NO: 5582 - RNA, 28 nt, synthetic construct
  source 1..28: mol_type = other RNA
aaaaaaaaaaaaaaaatataaatatata

SEQ ID NO: 5583 - RNA, 28 nt, synthetic construct
  source 1..28: mol_type = other RNA
aaaaaaaaaaaaaaaaaaaaaaatataa

SEQ ID NO: 5584 - RNA, 28 nt, synthetic construct
  source 1..28: mol_type = other RNA
aaaaaaaaaaaatatataaataaatata

SEQ ID NO: 5585 - RNA, 28 nt, synthetic construct
  source 1..28: mol_type = other RNA
aaaaaaaaaaaataaatataaatatata

SEQ ID NO: 5586 - RNA, 28 nt, synthetic construct
  source 1..28: mol_type = other RNA
aaaaaaaaaaaatataaataaatatata

SEQ ID NO: 5587 - RNA, 28 nt, synthetic construct
  source 1..28: mol_type = other RNA
aaaaaaaaaaaataaatatataaatata

SEQ ID NO: 5588 - RNA, 28 nt, synthetic construct
  source 1..28: mol_type = other RNA
aaaaaaaaaaaaaaaaaaatataaataa

SEQ ID NO: 5589 - RNA, 28 nt, synthetic construct
  source 1..28: mol_type = other RNA
aaaaaaaaaaaaaaaaaaataaatataa

SEQ ID NO: 5590 - RNA, 28 nt, synthetic construct
  source 1..28: mol_type = other RNA
aaaaaaaataaatatataaataaatata

SEQ ID NO: 5591 - RNA, 28 nt, synthetic construct
  source 1..28: mol_type = other RNA
aaaaaaaatatataaataaataaatata

SEQ ID NO: 5592 - RNA, 28 nt, synthetic construct
  source 1..28: mol_type = other RNA
aaaaaaaataaataaatatataaatata

SEQ ID NO: 5593 - RNA, 28 nt, synthetic construct
  source 1..28: mol_type = other RNA
aaaaaaaataaataaatataaatatata

SEQ ID NO: 5594 - RNA, 28 nt, synthetic construct
  source 1..28: mol_type = other RNA
aaaaaaaataaatataaataaatatata

SEQ ID NO: 5595 - RNA, 28 nt, synthetic construct
  source 1..28: mol_type = other RNA
aaaaaaaatataaataaataaatatata

SEQ ID NO: 5596 - RNA, 28 nt, synthetic construct
  source 1..28: mol_type = other RNA
aaaaaaaaaaaaaaataaatataaataa

SEQ ID NO: 5597 - RNA, 28 nt, synthetic construct
  source 1..28: mol_type = other RNA
aaaaaaaaaaaaaaatataaataaataa

SEQ ID NO: 5598 - RNA, 28 nt, synthetic construct
  source 1..28: mol_type = other RNA
aaaaaaaaaaaaaaataaataaatataa

SEQ ID NO: 5599 - RNA, 28 nt, synthetic construct
  source 1..28: mol_type = other RNA
aaaataaatatataaataaataaatata

SEQ ID NO: 5600 - RNA, 28 nt, synthetic construct
  source 1..28: mol_type = other RNA
aaaataaataaatatataaataaatata

SEQ ID NO: 5601 - RNA, 28 nt, synthetic construct
  source 1..28: mol_type = other RNA
aaaataaataaataaatatataaatata

SEQ ID NO: 5602 - RNA, 28 nt, synthetic construct
  source 1..28: mol_type = other RNA
aaaataaataaataaatataaatatata

SEQ ID NO: 5603 - RNA, 28 nt, synthetic construct
  source 1..28: mol_type = other RNA
aaaataaataaatataaataaatatata

SEQ ID NO: 5604 - RNA, 28 nt, synthetic construct
  source 1..28: mol_type = other RNA
aaaataaatataaataaataaatatata

SEQ ID NO: 5605 - RNA, 28 nt, synthetic construct
  source 1..28: mol_type = other RNA
aaaatataaataaataaataaatatata

SEQ ID NO: 5606 - RNA, 28 nt, synthetic construct
  source 1..28: mol_type = other RNA
aaaatatataaataaataaataaatata

SEQ ID NO: 5607 - RNA, 28 nt, synthetic construct
  source 1..28: mol_type = other RNA
aaaaaaaaaaaaaaaaaaaaaatataaa

SEQ ID NO: 5608 - RNA, 28 nt, synthetic construct
  source 1..28: mol_type = other RNA
aaaaaaaaaaatataaataaataaataa

SEQ ID NO: 5609 - RNA, 28 nt, synthetic construct
  source 1..28: mol_type = other RNA
aaaaaaaaaaataaataaatataaataa

SEQ ID NO: 5610 - RNA, 28 nt, synthetic construct
  source 1..28: mol_type = other RNA
aaaaaaaaaaataaatataaataaataa

SEQ ID NO: 5611 - RNA, 28 nt, synthetic construct
  source 1..28: mol_type = other RNA
aaaaaaaaaaataaataaataaatataa

SEQ ID NO: 5612 - RNA, 28 nt, synthetic construct
  source 1..28: mol_type = other RNA
aaaaaaaaaaaaaaaaaataaatataaa

SEQ ID NO: 5613 - RNA, 28 nt, synthetic construct
  source 1..28: mol_type = other RNA
aaaaaaaaaaaaaaaaaatataaataaa

SEQ ID NO: 5614 - RNA, 28 nt, synthetic construct
  source 1..28: mol_type = other RNA
aaataaaaaaaaaaaaaaaaaatatata

SEQ ID NO: 5615 - RNA, 28 nt, synthetic construct
  source 1..28: mol_type = other RNA
aaaaaaatataaataaataaataaataa

SEQ ID NO: 5616 - RNA, 28 nt, synthetic construct
  source 1..28: mol_type = other RNA
aaaaaaataaatataaataaataaataa

SEQ ID NO: 5617 - RNA, 28 nt, synthetic construct
  source 1..28: mol_type = other RNA
aaaaaaataaataaataaatataaataa

SEQ ID NO: 5618 - RNA, 28 nt, synthetic construct
  source 1..28: mol_type = other RNA
aaaaaaataaataaatataaataaataa

SEQ ID NO: 5619 - RNA, 28 nt, synthetic construct
  source 1..28: mol_type = other RNA
aaaaaaataaataaataaataaatataa

SEQ ID NO: 5620 - RNA, 28 nt, synthetic construct
  source 1..28: mol_type = other RNA
aaaaaaaaaaaaaatataaataaataaa

SEQ ID NO: 5621 - RNA, 28 nt, synthetic construct
  source 1..28: mol_type = other RNA
aaaaaaaaaaaaaataaatataaataaa

SEQ ID NO: 5622 - RNA, 28 nt, synthetic construct
  source 1..28: mol_type = other RNA
aaaaaaaaaaaaaataaataaatataaa

SEQ ID NO: 5623 - RNA, 28 nt, synthetic construct
  source 1..28: mol_type = other RNA
aaataaataaaaaaaaaaaaaatatata

SEQ ID NO: 5624 - RNA, 28 nt, synthetic construct
  source 1..28: mol_type = other RNA
aaataaaaaaaaaaaaaataaatatata

SEQ ID NO: 5625 - RNA, 28 nt, synthetic construct
  source 1..28: mol_type = other RNA
aaataaaaaaaaaaaaaaaaaaaaataa

SEQ ID NO: 5626 - RNA, 28 nt, synthetic construct
  source 1..28: mol_type = other RNA
aaaaaaaaaatataaataaataaataaa

SEQ ID NO: 5627 - RNA, 28 nt, synthetic construct
  source 1..28: mol_type = other RNA
aaaaaaaaaataaatataaataaataaa

SEQ ID NO: 5628 - RNA, 28 nt, synthetic construct
  source 1..28: mol_type = other RNA
aaaaaaaaaataaataaataaatataaa

SEQ ID NO: 5629 - RNA, 28 nt, synthetic construct
  source 1..28: mol_type = other RNA
aaaaaaaaaataaataaatataaataaa

SEQ ID NO: 5630 - RNA, 28 nt, synthetic construct
  source 1..28: mol_type = other RNA
aaataaaaaaaaaataaataaatatata

SEQ ID NO: 5631 - RNA, 28 nt, synthetic construct
  source 1..28: mol_type = other RNA
aaataaataaataaaaaaaaaatatata

SEQ ID NO: 5632 - RNA, 28 nt, synthetic construct
  source 1..28: mol_type = other RNA
aaataaataaaaaaaaaataaatatata

SEQ ID NO: 5633 - RNA, 28 nt, synthetic construct
  source 1..28: mol_type = other RNA
aaataaaaaaaaaaaaaaaaataaataa

SEQ ID NO: 5634 - RNA, 28 nt, synthetic construct
  source 1..28: mol_type = other RNA
aaataaataaaaaaaaaaaaaaaaataa

SEQ ID NO: 5635 - RNA, 28 nt, synthetic construct
  source 1..28: mol_type = other RNA
aaaaaatataaataaataaataaataaa

SEQ ID NO: 5636 - RNA, 28 nt, synthetic construct
  source 1..28: mol_type = other RNA
aaaaaataaataaatataaataaataaa

SEQ ID NO: 5637 - RNA, 28 nt, synthetic construct
  source 1..28: mol_type = other RNA
aaaaaataaataaataaatataaataaa

SEQ ID NO: 5638 - RNA, 28 nt, synthetic construct
  source 1..28: mol_type = other RNA
aaaaaataaatataaataaataaataaa

SEQ ID NO: 5639 - RNA, 28 nt, synthetic construct
  source 1..28: mol_type = other RNA
aaaaaataaataaataaataaatataaa

SEQ ID NO: 5640 - RNA, 28 nt, synthetic construct
  source 1..28: mol_type = other RNA
aaataaataaaaaataaataaatatata

SEQ ID NO: 5641 - RNA, 28 nt, synthetic construct
  source 1..28: mol_type = other RNA
aaataaataaataaaaaataaatatata

SEQ ID NO: 5642 - RNA, 28 nt, synthetic construct
  source 1..28: mol_type = other RNA
aaataaataaataaataaaaaatatata

SEQ ID NO: 5643 - RNA, 28 nt, synthetic construct
  source 1..28: mol_type = other RNA
aaaaaaaaaaaaaaaaaaaatatatata

SEQ ID NO: 5644 - RNA, 28 nt, synthetic construct
  source 1..28: mol_type = other RNA
aaataaaaaataaataaataaatatata

SEQ ID NO: 5645 - RNA, 28 nt, synthetic construct
  source 1..28: mol_type = other RNA
aaataaaaaaaaaaaaataaataaataa

SEQ ID NO: 5646 - RNA, 28 nt, synthetic construct
  source 1..28: mol_type = other RNA
aaataaataaaaaaaaaaaaataaataa

SEQ ID NO: 5647 - RNA, 28 nt, synthetic construct
  source 1..28: mol_type = other RNA
aaataaataaataaaaaaaaaaaaataa

SEQ ID NO: 5648 - RNA, 28 nt, synthetic construct
  source 1..28: mol_type = other RNA
aaaaaaaaaaaaaaaataaatatatata

SEQ ID NO: 5649 - RNA, 28 nt, synthetic construct
  source 1..28: mol_type = other RNA
aaataaaaaaaaaaaaaaaaaaaataaa

SEQ ID NO: 5650 - RNA, 28 nt, synthetic construct
  source 1..28: mol_type = other RNA
aaataaataaataaataaaaaaaaataa

SEQ ID NO: 5651 - RNA, 28 nt, synthetic construct
  source 1..28: mol_type = other RNA
aaataaaaaaaaataaataaataaataa

SEQ ID NO: 5652 - RNA, 28 nt, synthetic construct
  source 1..28: mol_type = other RNA
aaataaataaaaaaaaataaataaataa

SEQ ID NO: 5653 - RNA, 28 nt, synthetic construct
  source 1..28: mol_type = other RNA
aaataaataaataaaaaaaaataaataa

SEQ ID NO: 5654 - RNA, 28 nt, synthetic construct
  source 1..28: mol_type = other RNA
aaaaaaaaaaaataaataaatatatata

SEQ ID NO: 5655 - RNA, 28 nt, synthetic construct
  source 1..28: mol_type = other RNA
aaataaataaaaaaaaaaaaaaaataaa

SEQ ID NO: 5656 - RNA, 28 nt, synthetic construct
  source 1..28: mol_type = other RNA
aaataaaaaaaaaaaaaaaataaataaa

SEQ ID NO: 5657 - RNA, 28 nt, synthetic construct
  source 1..28: mol_type = other RNA
aaataaaaataaataaataaataaataa

SEQ ID NO: 5658 - RNA, 28 nt, synthetic construct
  source 1..28: mol_type = other RNA
aaataaataaaaataaataaataaataa

SEQ ID NO: 5659 - RNA, 28 nt, synthetic construct
  source 1..28: mol_type = other RNA
aaataaataaataaataaaaataaataa

SEQ ID NO: 5660 - RNA, 28 nt, synthetic construct
  source 1..28: mol_type = other RNA
aaataaataaataaataaataaaaataa

SEQ ID NO: 5661 - RNA, 28 nt, synthetic construct
  source 1..28: mol_type = other RNA
aaataaataaataaaaataaataaataa

SEQ ID NO: 5662 - RNA, 28 nt, synthetic construct
  source 1..28: mol_type = other RNA
aaataaataaataaataaataaatatac

SEQ ID NO: 5663 - RNA, 29 nt, synthetic construct
  source 1..29: mol_type = other RNA
aaataaataaataaataaatataaatata

SEQ ID NO: 5664 - RNA, 29 nt, synthetic construct
  source 1..29: mol_type = other RNA
aaatataaataaataaataaataaatata

SEQ ID NO: 5665 - RNA, 29 nt, synthetic construct
  source 1..29: mol_type = other RNA
aaataaatataaataaataaataaatata

SEQ ID NO: 5666 - RNA, 29 nt, synthetic construct
  source 1..29: mol_type = other RNA
aaataaataaatataaataaataaatata

SEQ ID NO: 5667 - RNA, 29 nt, synthetic construct
  source 1..29: mol_type = other RNA
aaataaataaataaatataaataaatata

SEQ ID NO: 5668 - RNA, 29 nt, synthetic construct
  source 1..29: mol_type = other RNA
aaataaataaataaataaataaatatata

SEQ ID NO: 5669 - RNA, 29 nt, synthetic construct
  source 1..29: mol_type = other RNA
aaaaaaaaaaaaaaaaaaaaaaaaatata

SEQ ID NO: 5670 - RNA, 29 nt, synthetic construct
  source 1..29: mol_type = other RNA
aaaaaaaaaaaaaaaaaaaaataaatata

SEQ ID NO: 5671 - RNA, 29 nt, synthetic construct
  source 1..29: mol_type = other RNA
aaaaaaaaaaaaaaaaataaataaatata

SEQ ID NO: 5672 - RNA, 29 nt, synthetic construct
  source 1..29: mol_type = other RNA
aaaaaaaaaaaaataaataaataaatata

SEQ ID NO: 5673 - RNA, 29 nt, synthetic construct
  source 1..29: mol_type = other RNA
aaaaaaaaataaataaataaataaatata

SEQ ID NO: 5674 - RNA, 29 nt, synthetic construct
  source 1..29: mol_type = other RNA
aaaaataaataaataaataaataaatata

SEQ ID NO: 5675 - RNA, 29 nt, synthetic construct
  source 1..29: mol_type = other RNA
aaataaataaataaataaataaataaata

SEQ ID NO: 5676 - RNA, 29 nt, synthetic construct
  source 1..29: mol_type = other RNA
aaataaataaataaataaataaatataaa

SEQ ID NO: 5677 - RNA, 29 nt, synthetic construct
  source 1..29: mol_type = other RNA
aaatataaataaataaataaataaataaa

SEQ ID NO: 5678 - RNA, 29 nt, synthetic construct
  source 1..29: mol_type = other RNA
aaataaatataaataaataaataaataaa

SEQ ID NO: 5679 - RNA, 29 nt, synthetic construct
  source 1..29: mol_type = other RNA
aaataaataaatataaataaataaataaa

SEQ ID NO: 5680 - RNA, 29 nt, synthetic construct
  source 1..29: mol_type = other RNA
aaataaataaataaatataaataaataaa

SEQ ID NO: 5681 - RNA, 29 nt, synthetic construct
  source 1..29: mol_type = other RNA
aaataaataaataaataaatataaataaa

SEQ ID NO: 5682 - RNA, 29 nt, synthetic construct
  source 1..29: mol_type = other RNA
aaaaaaaaaaaaaaaaaaatataaatata

SEQ ID NO: 5683 - RNA, 29 nt, synthetic construct
  source 1..29: mol_type = other RNA
aaaaaaaaaaaaaaataaatataaatata

SEQ ID NO: 5684 - RNA, 29 nt, synthetic construct
  source 1..29: mol_type = other RNA
aaaaaaaaaaaaaaatataaataaatata

SEQ ID NO: 5685 - RNA, 29 nt, synthetic construct
  source 1..29: mol_type = other RNA
aaaaaaaaaaataaataaatataaatata

SEQ ID NO: 5686 - RNA, 29 nt, synthetic construct
  source 1..29: mol_type = other RNA
aaaaaaaaaaataaatataaataaatata

SEQ ID NO: 5687 - RNA, 29 nt, synthetic construct
  source 1..29: mol_type = other RNA
aaaaaaaaaaatataaataaataaatata

SEQ ID NO: 5688 - RNA, 29 nt, synthetic construct
  source 1..29: mol_type = other RNA
aaaaaaataaataaataaatataaatata

SEQ ID NO: 5689 - RNA, 29 nt, synthetic construct
  source 1..29: mol_type = other RNA
aaaaaaataaataaatataaataaatata

SEQ ID NO: 5690 - RNA, 29 nt, synthetic construct
  source 1..29: mol_type = other RNA
aaaaaaatataaataaataaataaatata

SEQ ID NO: 5691 - RNA, 29 nt, synthetic construct
  source 1..29: mol_type = other RNA
aaaaaaataaatataaataaataaatata

SEQ ID NO: 5692 - RNA, 29 nt, synthetic construct
  source 1..29: mol_type = other RNA
aaataaaaaaaaaaaaaaaaaaaaatata

SEQ ID NO: 5693 - RNA, 29 nt, synthetic construct
  source 1..29: mol_type = other RNA
aaataaataaaaaaaaaaaaaaaaatata

SEQ ID NO: 5694 - RNA, 29 nt, synthetic construct
  source 1..29: mol_type = other RNA
aaataaaaaaaaaaaaaaaaataaatata

SEQ ID NO: 5695 - RNA, 29 nt, synthetic construct
  source 1..29: mol_type = other RNA
aaataaaaaaaaaaaaataaataaatata

SEQ ID NO: 5696 - RNA, 29 nt, synthetic construct
  source 1..29: mol_type = other RNA
aaataaataaaaaaaaaaaaataaatata

SEQ ID NO: 5697 - RNA, 29 nt, synthetic construct
  source 1..29: mol_type = other RNA
aaataaataaataaaaaaaaaaaaatata

SEQ ID NO: 5698 - RNA, 29 nt, synthetic construct
  source 1..29: mol_type = other RNA
aaataaataaaaaaaaataaataaatata

SEQ ID NO: 5699 - RNA, 29 nt, synthetic construct
  source 1..29: mol_type = other RNA
aaataaaaaaaaataaataaataaatata

SEQ ID NO: 5700 - RNA, 29 nt, synthetic construct
  source 1..29: mol_type = other RNA
aaataaataaataaataaaaaaaaatata

SEQ ID NO: 5701 - RNA, 29 nt, synthetic construct
  source 1..29: mol_type = other RNA
aaataaataaataaaaaaaaataaatata

SEQ ID NO: 5702 - RNA, 29 nt, synthetic construct
  source 1..29: mol_type = other RNA
aaaaaaaaaaaaaaaaaaaaaaatatata

SEQ ID NO: 5703 - RNA, 29 nt, synthetic construct
  source 1..29: mol_type = other RNA
aaataaataaataaataaataaaaatata

SEQ ID NO: 5704 - RNA, 29 nt, synthetic construct
  source 1..29: mol_type = other RNA
aaataaataaataaataaaaataaatata

SEQ ID NO: 5705 - RNA, 29 nt, synthetic construct
  source 1..29: mol_type = other RNA
aaataaaaataaataaataaataaatata

SEQ ID NO: 5706 - RNA, 29 nt, synthetic construct
  source 1..29: mol_type = other RNA
aaataaataaaaataaataaataaatata

SEQ ID NO: 5707 - RNA, 29 nt, synthetic construct
  source 1..29: mol_type = other RNA
aaataaataaataaaaataaataaatata

SEQ ID NO: 5708 - RNA, 29 nt, synthetic construct
  source 1..29: mol_type = other RNA
aaaaaaaaaaaaaaaaaaataaatatata

SEQ ID NO: 5709 - RNA, 29 nt, synthetic construct
  source 1..29: mol_type = other RNA
aaaaaaaaaaaaaaaaaaaaaaaaaataa

SEQ ID NO: 5710 - RNA, 29 nt, synthetic construct
  source 1..29: mol_type = other RNA
aaaaaaaaaaaaaaataaataaatatata

SEQ ID NO: 5711 - RNA, 29 nt, synthetic construct
  source 1..29: mol_type = other RNA
aaaaaaaaaaaaaaaaaaaaaataaataa

SEQ ID NO: 5712 - RNA, 29 nt, synthetic construct
  source 1..29: mol_type = other RNA
aaaaaaaaaaataaataaataaatatata

SEQ ID NO: 5713 - RNA, 29 nt, synthetic construct
  source 1..29: mol_type = other RNA
aaaaaaaaaaaaaaaaaataaataaataa

SEQ ID NO: 5714 - RNA, 29 nt, synthetic construct
  source 1..29: mol_type = other RNA
aaaaaaataaataaataaataaatatata

SEQ ID NO: 5715 - RNA, 29 nt, synthetic construct
  source 1..29: mol_type = other RNA
aaaaaaaaaaaaaaaaaaaaaaaaataaa

SEQ ID NO: 5716 - RNA, 29 nt, synthetic construct
  source 1..29: mol_type = other RNA
aaaaaaaaaaaaaataaataaataaataa

SEQ ID NO: 5717 - RNA, 29 nt, synthetic construct
  source 1..29: mol_type = other RNA
aaaaaaaaaaaaaaaaaaaaataaataaa

SEQ ID NO: 5718 - RNA, 29 nt, synthetic construct
  source 1..29: mol_type = other RNA
aaaaaaaaaataaataaataaataaataa

SEQ ID NO: 5719 - RNA, 29 nt, synthetic construct
  source 1..29: mol_type = other RNA
aaaaaaaaaaaaaaaaataaataaataaa

SEQ ID NO: 5720 - RNA, 29 nt, synthetic construct
  source 1..29: mol_type = other RNA
aaaaaataaataaataaataaataaataa

SEQ ID NO: 5721 - RNA, 29 nt, synthetic construct
  source 1..29: mol_type = other RNA
aaatataaatataaatataaataaatata

SEQ ID NO: 5722 - RNA, 29 nt, synthetic construct
  source 1..29: mol_type = other RNA
aaataaatataaatataaatataaatata

SEQ ID NO: 5723 - RNA, 29 nt, synthetic construct
  source 1..29: mol_type = other RNA
aaatataaataaatataaatataaatata

SEQ ID NO: 5724 - RNA, 29 nt, synthetic construct
  source 1..29: mol_type = other RNA
aaaaaaaaaaaaataaataaataaataaa

SEQ ID NO: 5725 - RNA, 29 nt, synthetic construct
  source 1..29: mol_type = other RNA
aaaaaaaaataaataaataaataaataaa

SEQ ID NO: 5726 - RNA, 29 nt, synthetic construct
  source 1..29: mol_type = other RNA
aaaaataaataaataaataaataaataaa

SEQ ID NO: 5727 - RNA, 29 nt, synthetic construct
  source 1..29: mol_type = other RNA
aaaaaaaaaaaaaaaaaaaaaaaaaatat

SEQ ID NO: 5728 - RNA, 29 nt, synthetic construct
  source 1..29: mol_type = other RNA
aaaaaaaaaaaaaaaaaaaaaataaatat

SEQ ID NO: 5729 - RNA, 29 nt, synthetic construct
  source 1..29: mol_type = other RNA
aaaaaaaaaaaaaaaaaataaataaatat

SEQ ID NO: 5730 - RNA, 29 nt, synthetic construct
  source 1..29: mol_type = other RNA
aaaaaaaaaaaaaataaataaataaatat

SEQ ID NO: 5731 - RNA, 29 nt, synthetic construct
  source 1..29: mol_type = other RNA
aaaaaaaaaataaataaataaataaatat

SEQ ID NO: 5732 - RNA, 29 nt, synthetic construct
  source 1..29: mol_type = other RNA
aaaaaataaataaataaataaataaatat

SEQ ID NO: 5733 - RNA, 29 nt, synthetic construct
  source 1..29: mol_type = other RNA
aaataaataaatataaatataaatatata

SEQ ID NO: 5734 - RNA, 29 nt, synthetic construct
  source 1..29: mol_type = other RNA
aaataaataaatatataaatataaatata

SEQ ID NO: 5735 - RNA, 29 nt, synthetic construct
  source 1..29: mol_type = other RNA
aaataaatatataaataaatataaatata

SEQ ID NO: 5736 - RNA, 29 nt, synthetic construct
  source 1..29: mol_type = other RNA
aaataaatataaataaatatataaatata

SEQ ID NO: 5737 - RNA, 29 nt, synthetic construct
  source 1..29: mol_type = other RNA
aaataaatataaatatataaataaatata

SEQ ID NO: 5738 - RNA, 29 nt, synthetic construct
  source 1..29: mol_type = other RNA
aaataaatataaatataaataaatatata

SEQ ID NO: 5739 - RNA, 29 nt, synthetic construct
  source 1..29: mol_type = other RNA
aaataaataaatataaatatataaatata

SEQ ID NO: 5740 - RNA, 29 nt, synthetic construct
  source 1..29: mol_type = other RNA
aaatatataaataaataaatataaatata

SEQ ID NO: 5741 - RNA, 29 nt, synthetic construct
  source 1..29: mol_type = other RNA
aaatataaatataaataaataaatatata

SEQ ID NO: 5742 - RNA, 29 nt, synthetic construct
  source 1..29: mol_type = other RNA
aaatataaataaataaatataaatatata

SEQ ID NO: 5743 - RNA, 29 nt, synthetic construct
  source 1..29: mol_type = other RNA
aaatataaataaatatataaataaatata

SEQ ID NO: 5744 - RNA, 29 nt, synthetic construct
  source 1..29: mol_type = other RNA
aaatataaatatataaataaataaatata

SEQ ID NO: 5745 - RNA, 29 nt, synthetic construct
  source 1..29: mol_type = other RNA
aaatatataaataaatataaataaatata

SEQ ID NO: 5746 - RNA, 29 nt, synthetic construct
  source 1..29: mol_type = other RNA
aaatatataaatataaataaataaatata

SEQ ID NO: 5747 - RNA, 29 nt, synthetic construct
  source 1..29: mol_type = other RNA
aaataaatataaataaatataaatatata

SEQ ID NO: 5748 - RNA, 29 nt, synthetic construct
  source 1..29: mol_type = other RNA
aaataaatatataaatataaataaatata

SEQ ID NO: 5749 - RNA, 29 nt, synthetic construct
  source 1..29: mol_type = other RNA
aaatataaataaatataaataaatatata

SEQ ID NO: 5750 - RNA, 29 nt, synthetic construct
  source 1..29: mol_type = other RNA
aaatataaataaataaatatataaatata

SEQ ID NO: 5751 - RNA, 29 nt, synthetic construct
  source 1..29: mol_type = other RNA
ataaataaataaataaataaataaatata

SEQ ID NO: 5752 - RNA, 29 nt, synthetic construct
  source 1..29: mol_type = other RNA
aaataaatatatataaataaataaatata

SEQ ID NO: 5753 - RNA, 29 nt, synthetic construct
  source 1..29: mol_type = other RNA
aaataaataaatatataaataaatatata

SEQ ID NO: 5754 - RNA, 29 nt, synthetic construct
  source 1..29: mol_type = other RNA
aaataaataaataaatatataaatatata

SEQ ID NO: 5755 - RNA, 29 nt, synthetic construct
  source 1..29: mol_type = other RNA
aaataaatatataaataaataaatatata

SEQ ID NO: 5756 - RNA, 29 nt, synthetic construct
  source 1..29: mol_type = other RNA
aaatatataaataaataaataaatatata

SEQ ID NO: 5757 - RNA, 29 nt, synthetic construct
  source 1..29: mol_type = other RNA
aaataaatataaataaataaatatatata

SEQ ID NO: 5758 - RNA, 29 nt, synthetic construct
  source 1..29: mol_type = other RNA
aaataaataaatataaataaatatatata

SEQ ID NO: 5759 - RNA, 29 nt, synthetic construct
  source 1..29: mol_type = other RNA
aaataaataaataaatataaatatatata

SEQ ID NO: 5760 - RNA, 29 nt, synthetic construct
  source 1..29: mol_type = other RNA
aaataaataaataaatatatataaatata

SEQ ID NO: 5761 - RNA, 29 nt, synthetic construct
  source 1..29: mol_type = other RNA
aaataaataaatatatataaataaatata

SEQ ID NO: 5762 - RNA, 29 nt, synthetic construct
  source 1..29: mol_type = other RNA
aaatataaataaataaataaatatatata

SEQ ID NO: 5763 - RNA, 29 nt, synthetic construct
  source 1..29: mol_type = other RNA
aaatatatataaataaataaataaatata

SEQ ID NO: 5764 - RNA, 29 nt, synthetic construct
  source 1..29: mol_type = other RNA
aaaaaaaaaaaaaaaaaaaaaaaaaaata

SEQ ID NO: 5765 - RNA, 29 nt, synthetic construct
  source 1..29: mol_type = other RNA
aaaaaaaaaaaaaaaaaaaaaaataaata

SEQ ID NO: 5766 - RNA, 29 nt, synthetic construct
  source 1..29: mol_type = other RNA
aaaaaaaaaaaaatataaatataaatata

SEQ ID NO: 5767 - RNA, 29 nt, synthetic construct
  source 1..29: mol_type = other RNA
aaaaaaaaaaaaaaaaaaataaataaata

SEQ ID NO: 5768 - RNA, 29 nt, synthetic construct
  source 1..29: mol_type = other RNA
aaaaaaaaatataaataaatataaatata

SEQ ID NO: 5769 - RNA, 29 nt, synthetic construct
  source 1..29: mol_type = other RNA
aaaaaaaaataaatataaatataaatata

SEQ ID NO: 5770 - RNA, 29 nt, synthetic construct
  source 1..29: mol_type = other RNA
aaaaaaaaatataaatataaataaatata

SEQ ID NO: 5771 - RNA, 29 nt, synthetic construct
  source 1..29: mol_type = other RNA
aaaaaaaaaaaaaaataaataaataaata

SEQ ID NO: 5772 - RNA, 29 nt, synthetic construct
  source 1..29: mol_type = other RNA
aaaaataaatataaataaatataaatata

SEQ ID NO: 5773 - RNA, 29 nt, synthetic construct
  source 1..29: mol_type = other RNA
aaaaatataaataaatataaataaatata

SEQ ID NO: 5774 - RNA, 29 nt, synthetic construct
  source 1..29: mol_type = other RNA
aaaaatataaataaataaatataaatata

SEQ ID NO: 5775 - RNA, 29 nt, synthetic construct
  source 1..29: mol_type = other RNA
aaaaataaatataaatataaataaatata

SEQ ID NO: 5776 - RNA, 29 nt, synthetic construct
  source 1..29: mol_type = other RNA
aaaaatataaatataaataaataaatata

SEQ ID NO: 5777 - RNA, 29 nt, synthetic construct
  source 1..29: mol_type = other RNA
aaaaataaataaatataaatataaatata

SEQ ID NO: 5778 - RNA, 29 nt, synthetic construct
  source 1..29: mol_type = other RNA
aaaaaaaaaaataaataaataaataaata

SEQ ID NO: 5779 - RNA, 29 nt, synthetic construct
  source 1..29: mol_type = other RNA
aaatataaaaaaaaaaaaaaaaaaatata

SEQ ID NO: 5780 - RNA, 29 nt, synthetic construct
  source 1..29: mol_type = other RNA
aaaaaaataaataaataaataaataaata

SEQ ID NO: 5781 - RNA, 29 nt, synthetic construct
  source 1..29: mol_type = other RNA
aaataaaaaaaaaaaaaaatataaatata

SEQ ID NO: 5782 - RNA, 29 nt, synthetic construct
  source 1..29: mol_type = other RNA
aaatataaaaaaaaaaaaaaataaatata

SEQ ID NO: 5783 - RNA, 29 nt, synthetic construct
  source 1..29: mol_type = other RNA
aaataaatataaaaaaaaaaaaaaatata

SEQ ID NO: 5784 - RNA, 29 nt, synthetic construct
  source 1..29: mol_type = other RNA
aaatataaataaaaaaaaaaaaaaatata

SEQ ID NO: 5785 - RNA, 29 nt, synthetic construct
  source 1..29: mol_type = other RNA
aaataaataaataaatataaataaataat

SEQ ID NO: 5786 - RNA, 29 nt, synthetic construct
  source 1..29: mol_type = other RNA
aaataaataaataaataaatataaataat

SEQ ID NO: 5787 - RNA, 29 nt, synthetic construct
  source 1..29: mol_type = other RNA
aaatataaataaataaataaataaataat

SEQ ID NO: 5788 - RNA, 29 nt, synthetic construct
  source 1..29: mol_type = other RNA
aaataaatataaataaataaataaataat

SEQ ID NO: 5789 - RNA, 29 nt, synthetic construct
  source 1..29: mol_type = other RNA
aaataaataaatataaataaataaataat

SEQ ID NO: 5790 - RNA, 29 nt, synthetic construct
  source 1..29: mol_type = other RNA
aaataaataaaaaaaaaaatataaatata

SEQ ID NO: 5791 - RNA, 29 nt, synthetic construct
  source 1..29: mol_type = other RNA
aaataaataaatataaaaaaaaaaatata

SEQ ID NO: 5792 - RNA, 29 nt, synthetic construct
  source 1..29: mol_type = other RNA
aaataaaaaaaaaaataaatataaatata

SEQ ID NO: 5793 - RNA, 29 nt, synthetic construct
  source 1..29: mol_type = other RNA
aaatataaataaataaaaaaaaaaatata

SEQ ID NO: 5794 - RNA, 29 nt, synthetic construct
  source 1..29: mol_type = other RNA
aaatataaataaaaaaaaaaataaatata

SEQ ID NO: 5795 - RNA, 29 nt, synthetic construct
  source 1..29: mol_type = other RNA
aaataaatataaataaaaaaaaaaatata

SEQ ID NO: 5796 - RNA, 29 nt, synthetic construct
  source 1..29: mol_type = other RNA
aaataaatataaaaaaaaaaataaatata

SEQ ID NO: 5797 - RNA, 29 nt, synthetic construct
  source 1..29: mol_type = other RNA
aaataaaaaaaaaaatataaataaatata

SEQ ID NO: 5798 - RNA, 29 nt, synthetic construct
  source 1..29: mol_type = other RNA
aaatataaaaaaaaaaataaataaatata

SEQ ID NO: 5799 - RNA, 29 nt, synthetic construct
  source 1..29: mol_type = other RNA
aaataaataaataaataaatatatatata

SEQ ID NO: 5800 - RNA, 29 nt, synthetic construct
  source 1..29: mol_type = other RNA
aaataaataaatataaataaaaaaatata

SEQ ID NO: 5801 - RNA, 29 nt, synthetic construct
  source 1..29: mol_type = other RNA
aaataaaaaaataaataaatataaatata

SEQ ID NO: 5802 - RNA, 29 nt, synthetic construct
  source 1..29: mol_type = other RNA
aaataaataaaaaaataaatataaatata

SEQ ID NO: 5803 - RNA, 29 nt, synthetic construct
  source 1..29: mol_type = other RNA
aaatataaataaataaaaaaataaatata

SEQ ID NO: 5804 - RNA, 29 nt, synthetic construct
  source 1..29: mol_type = other RNA
aaatataaataaataaataaaaaaatata

SEQ ID NO: 5805 - RNA, 29 nt, synthetic construct
  source 1..29: mol_type = other RNA
aaatataaataaaaaaataaataaatata

SEQ ID NO: 5806 - RNA, 29 nt, synthetic construct
  source 1..29: mol_type = other RNA
aaatataaaaaaataaataaataaatata

SEQ ID NO: 5807 - RNA, 29 nt, synthetic construct
  source 1..29: mol_type = other RNA
aaataaatataaataaaaaaataaatata

SEQ ID NO: 5808 - RNA, 29 nt, synthetic construct
  source 1..29: mol_type = other RNA
aaataaataaatataaaaaaataaatata

SEQ ID NO: 5809 - RNA, 29 nt, synthetic construct
  source 1..29: mol_type = other RNA
aaataaataaataaaaaaatataaatata

SEQ ID NO: 5810 - RNA, 29 nt, synthetic construct
  source 1..29: mol_type = other RNA
aaataaaaaaatataaataaataaatata

SEQ ID NO: 5811 - RNA, 29 nt, synthetic construct
  source 1..29: mol_type = other RNA
aaataaatataaaaaaataaataaatata

SEQ ID NO: 5812 - RNA, 29 nt, synthetic construct
  source 1..29: mol_type = other RNA
aaataaataaaaaaatataaataaatata

SEQ ID NO: 5813 - RNA, 29 nt, synthetic construct
  source 1..29: mol_type = other RNA
aaataaatataaataaataaaaaaatata

SEQ ID NO: 5814 - RNA, 29 nt, synthetic construct
  source 1..29: mol_type = other RNA
aaataaataaataaatataaaaaaatata

SEQ ID NO: 5815 - RNA, 29 nt, synthetic construct
  source 1..29: mol_type = other RNA
aaataaaaaaataaatataaataaatata

SEQ ID NO: 5816 - RNA, 29 nt, synthetic construct
  source 1..29: mol_type = other RNA
aaaaaaaaaaaaaaaaatataaatatata

SEQ ID NO: 5817 - RNA, 29 nt, synthetic construct
  source 1..29: mol_type = other RNA
aaaaaaaaaaaaaaaaatatataaatata

SEQ ID NO: 5818 - RNA, 29 nt, synthetic construct
  source 1..29: mol_type = other RNA
aaaaaaaaaaaaaaaaaaaaaaaatataa

SEQ ID NO: 5819 - RNA, 29 nt, synthetic construct
  source 1..29: mol_type = other RNA
aataaataaataaataaataaataaataa

SEQ ID NO: 5820 - RNA, 29 nt, synthetic construct
  source 1..29: mol_type = other RNA
aaaaaaaaaaaaataaatataaatatata

SEQ ID NO: 5821 - RNA, 29 nt, synthetic construct
  source 1..29: mol_type = other RNA
aaaaaaaaaaaaatataaataaatatata

SEQ ID NO: 5822 - RNA, 29 nt, synthetic construct
  source 1..29: mol_type = other RNA
aaaaaaaaaaaaatatataaataaatata

SEQ ID NO: 5823 - RNA, 29 nt, synthetic construct
  source 1..29: mol_type = other RNA
aaaaaaaaaaaaataaatatataaatata

SEQ ID NO: 5824 - RNA, 29 nt, synthetic construct
  source 1..29: mol_type = other RNA
aaaaaaaaaaaaaaaaaaaatataaataa

SEQ ID NO: 5825 - RNA, 29 nt, synthetic construct
  source 1..29: mol_type = other RNA
aaaaaaaaaaaaaaaaaaaataaatataa

SEQ ID NO: 5826 - RNA, 29 nt, synthetic construct
  source 1..29: mol_type = other RNA
aaaaaaaaataaataaatataaatatata

SEQ ID NO: 5827 - RNA, 29 nt, synthetic construct
  source 1..29: mol_type = other RNA
aaaaaaaaatataaataaataaatatata

SEQ ID NO: 5828 - RNA, 29 nt, synthetic construct
  source 1..29: mol_type = other RNA
aaaaaaaaataaataaatatataaatata

SEQ ID NO: 5829 - RNA, 29 nt, synthetic construct
  source 1..29: mol_type = other RNA
aaaaaaaaatatataaataaataaatata

SEQ ID NO: 5830 - RNA, 29 nt, synthetic construct
  source 1..29: mol_type = other RNA
aaaaaaaaataaatataaataaatatata

SEQ ID NO: 5831 - RNA, 29 nt, synthetic construct
  source 1..29: mol_type = other RNA
aaaaaaaaataaatatataaataaatata

SEQ ID NO: 5832 - RNA, 29 nt, synthetic construct
  source 1..29: mol_type = other RNA
aaaaaaaaaaaaaaaatataaataaataa

SEQ ID NO: 5833 - RNA, 29 nt, synthetic construct
  source 1..29: mol_type = other RNA
aaaaaaaaaaaaaaaataaatataaataa

SEQ ID NO: 5834 - RNA, 29 nt, synthetic construct
  source 1..29: mol_type = other RNA
aaaaaaaaaaaaaaaataaataaatataa

SEQ ID NO: 5835 - RNA, 29 nt, synthetic construct
  source 1..29: mol_type = other RNA
aaaaataaataaataaatataaatatata

SEQ ID NO: 5836 - RNA, 29 nt, synthetic construct
  source 1..29: mol_type = other RNA
aaaaataaatataaataaataaatatata

SEQ ID NO: 5837 - RNA, 29 nt, synthetic construct
  source 1..29: mol_type = other RNA
aaaaataaataaatatataaataaatata

SEQ ID NO: 5838 - RNA, 29 nt, synthetic construct
  source 1..29: mol_type = other RNA
aaaaatataaataaataaataaatatata

SEQ ID NO: 5839 - RNA, 29 nt, synthetic construct
  source 1..29: mol_type = other RNA
aaaaatatataaataaataaataaatata

SEQ ID NO: 5840 - RNA, 29 nt, synthetic construct
  source 1..29: mol_type = other RNA
aaaaataaatatataaataaataaatata

SEQ ID NO: 5841 - RNA, 29 nt, synthetic construct
  source 1..29: mol_type = other RNA
aaaaataaataaatataaataaatatata

SEQ ID NO: 5842 - RNA, 29 nt, synthetic construct
  source 1..29: mol_type = other RNA
aaaaataaataaataaatatataaatata

SEQ ID NO: 5843 - RNA, 29 nt, synthetic construct
  source 1..29: mol_type = other RNA
aaaaaaaaaaaaaaaaaaaaaaatataaa

SEQ ID NO: 5844 - RNA, 29 nt, synthetic construct
  source 1..29: mol_type = other RNA
aaaaaaaaaaaataaatataaataaataa

SEQ ID NO: 5845 - RNA, 29 nt, synthetic construct
  source 1..29: mol_type = other RNA
aaaaaaaaaaaatataaataaataaataa

SEQ ID NO: 5846 - RNA, 29 nt, synthetic construct
  source 1..29: mol_type = other RNA
aaaaaaaaaaaataaataaataaatataa

SEQ ID NO: 5847 - RNA, 29 nt, synthetic construct
  source 1..29: mol_type = other RNA
aaaaaaaaaaaataaataaatataaataa

SEQ ID NO: 5848 - RNA, 29 nt, synthetic construct
  source 1..29: mol_type = other RNA
aaaaaaaaaaaaaaaaaaataaatataaa

SEQ ID NO: 5849 - RNA, 29 nt, synthetic construct
  source 1..29: mol_type = other RNA
aaaaaaaaaaaaaaaaaaatataaataaa

SEQ ID NO: 5850 - RNA, 29 nt, synthetic construct
  source 1..29: mol_type = other RNA
aaataaaaaaaaaaaaaaaaaaatatata

SEQ ID NO: 5851 - RNA, 29 nt, synthetic construct
  source 1..29: mol_type = other RNA
aaaaaaaataaataaataaataaatataa

SEQ ID NO: 5852 - RNA, 29 nt, synthetic construct
  source 1..29: mol_type = other RNA
aaaaaaaataaatataaataaataaataa

SEQ ID NO: 5853 - RNA, 29 nt, synthetic construct
  source 1..29: mol_type = other RNA
aaaaaaaataaataaataaatataaataa

SEQ ID NO: 5854 - RNA, 29 nt, synthetic construct
  source 1..29: mol_type = other RNA
aaaaaaaataaataaatataaataaataa

SEQ ID NO: 5855 - RNA, 29 nt, synthetic construct
  source 1..29: mol_type = other RNA
aaaaaaaatataaataaataaataaataa

SEQ ID NO: 5856 - RNA, 29 nt, synthetic construct
  source 1..29: mol_type = other RNA
aaaaaaaaaaaaaaataaataaatataaa

SEQ ID NO: 5857 - RNA, 29 nt, synthetic construct
  source 1..29: mol_type = other RNA
aaaaaaaaaaaaaaataaatataaataaa

SEQ ID NO: 5858 - RNA, 29 nt, synthetic construct
  source 1..29: mol_type = other RNA
aaaaaaaaaaaaaaatataaataaataaa

SEQ ID NO: 5859 - RNA, 29 nt, synthetic construct
  source 1..29: mol_type = other RNA
aaataaataaaaaaaaaaaaaaatatata

SEQ ID NO: 5860 - RNA, 29 nt, synthetic construct
  source 1..29: mol_type = other RNA
aaataaaaaaaaaaaaaaataaatatata

SEQ ID NO: 5861 - RNA, 29 nt, synthetic construct
  source 1..29: mol_type = other RNA
aaaataaataaataaataaataaatataa

SEQ ID NO: 5862 - RNA, 29 nt, synthetic construct
  source 1..29: mol_type = other RNA
aaaatataaataaataaataaataaataa

SEQ ID NO: 5863 - RNA, 29 nt, synthetic construct
  source 1..29: mol_type = other RNA
aaaataaataaataaataaatataaataa

SEQ ID NO: 5864 - RNA, 29 nt, synthetic construct
  source 1..29: mol_type = other RNA
aaaataaataaataaatataaataaataa

SEQ ID NO: 5865 - RNA, 29 nt, synthetic construct
  source 1..29: mol_type = other RNA
aaaataaataaatataaataaataaataa

SEQ ID NO: 5866 - RNA, 29 nt, synthetic construct
  source 1..29: mol_type = other RNA
aaaataaatataaataaataaataaataa

SEQ ID NO: 5867 - RNA, 30 nt, synthetic construct
  source 1..30: mol_type = other RNA
aaataaataaataaataaataaataaataa

SEQ ID NO: 5868 - RNA, 30 nt, synthetic construct
  source 1..30: mol_type = other RNA
aaaaaaaaaaaaaaaaaaaaaaaaaatata

SEQ ID NO: 5869 - RNA, 30 nt, synthetic construct
  source 1..30: mol_type = other RNA
aaaaaaaaaaaaaaaaaaaaaataaatata

SEQ ID NO: 5870 - RNA, 30 nt, synthetic construct
  source 1..30: mol_type = other RNA
aaaaaaaaaaaaaaaaaataaataaatata

SEQ ID NO: 5871 - RNA, 30 nt, synthetic construct
  source 1..30: mol_type = other RNA
aaaaaaaaaaaaaataaataaataaatata

SEQ ID NO: 5872 - RNA, 30 nt, synthetic construct
  source 1..30: mol_type = other RNA
aaataaataaataaataaataaataaatat

SEQ ID NO: 5873 - RNA, 30 nt, synthetic construct
  source 1..30: mol_type = other RNA
aaaaaaaaaataaataaataaataaatata

SEQ ID NO: 5874 - RNA, 30 nt, synthetic construct
  source 1..30: mol_type = other RNA
aaaaaataaataaataaataaataaatata

SEQ ID NO: 5875 - RNA, 30 nt, synthetic construct
  source 1..30: mol_type = other RNA
aataaataaataaataaataaataaatata

SEQ ID NO: 5876 - RNA, 30 nt, synthetic construct
  source 1..30: mol_type = other RNA
aaaaaaaaaaaaaaaaaaaatataaatata

SEQ ID NO: 5877 - RNA, 30 nt, synthetic construct
  source 1..30: mol_type = other RNA
aaaaaaaaaaaaaaaatataaataaatata

SEQ ID NO: 5878 - RNA, 30 nt, synthetic construct
  source 1..30: mol_type = other RNA
aaaaaaaaaaaaaaaataaatataaatata

SEQ ID NO: 5879 - RNA, 30 nt, synthetic construct
  source 1..30: mol_type = other RNA
aaaaaaaaaaaataaatataaataaatata

SEQ ID NO: 5880 - RNA, 30 nt, synthetic construct
  source 1..30: mol_type = other RNA
aaaaaaaaaaaatataaataaataaatata

SEQ ID NO: 5881 - RNA, 30 nt, synthetic construct
  source 1..30: mol_type = other RNA
aaaaaaaaaaaataaataaatataaatata

SEQ ID NO: 5882 - RNA, 30 nt, synthetic construct
  source 1..30: mol_type = other RNA
aaaaaaaatataaataaataaataaatata

SEQ ID NO: 5883 - RNA, 30 nt, synthetic construct
  source 1..30: mol_type = other RNA
aaaaaaaataaatataaataaataaatata

SEQ ID NO: 5884 - RNA, 30 nt, synthetic construct
  source 1..30: mol_type = other RNA
aaaaaaaataaataaatataaataaatata

SEQ ID NO: 5885 - RNA, 30 nt, synthetic construct
  source 1..30: mol_type = other RNA
aaaaaaaataaataaataaatataaatata

SEQ ID NO: 5886 - RNA, 30 nt, synthetic construct
  source 1..30: mol_type = other RNA
aaaataaataaatataaataaataaatata

SEQ ID NO: 5887 - RNA, 30 nt, synthetic construct
  source 1..30: mol_type = other RNA
aaaataaataaataaatataaataaatata

SEQ ID NO: 5888 - RNA, 30 nt, synthetic construct
  source 1..30: mol_type = other RNA
aaaataaatataaataaataaataaatata

SEQ ID NO: 5889 - RNA, 30 nt, synthetic construct
  source 1..30: mol_type = other RNA
aaaataaataaataaataaatataaatata

SEQ ID NO: 5890 - RNA, 30 nt, synthetic construct
  source 1..30: mol_type = other RNA
aaaatataaataaataaataaataaatata

SEQ ID NO: 5891 - RNA, 30 nt, synthetic construct
  source 1..30: mol_type = other RNA
aaataaaaaaaaaaaaaaaaaaaaaatata

SEQ ID NO: 5892 - RNA, 30 nt, synthetic construct
  source 1..30: mol_type = other RNA
aaataaaaaaaaaaaaaaaaaataaatata

SEQ ID NO: 5893 - RNA, 30 nt, synthetic construct
  source 1..30: mol_type = other RNA
aaataaataaaaaaaaaaaaaaaaaatata

SEQ ID NO: 5894 - RNA, 30 nt, synthetic construct
  source 1..30: mol_type = other RNA
aaataaaaaaaaaaaaaataaataaatata

SEQ ID NO: 5895 - RNA, 30 nt, synthetic construct
  source 1..30: mol_type = other RNA
aaataaataaaaaaaaaaaaaataaatata

SEQ ID NO: 5896 - RNA, 30 nt, synthetic construct
  source 1..30: mol_type = other RNA
aaataaataaataaaaaaaaaaaaaatata

SEQ ID NO: 5897 - RNA, 30 nt, synthetic construct
  source 1..30: mol_type = other RNA
aaaaaaaaaaaaaaaaaaaaaaaatatata

SEQ ID NO: 5898 - RNA, 30 nt, synthetic construct
  source 1..30: mol_type = other RNA
aaataaataaataaataaaaaaaaaatata

SEQ ID NO: 5899 - RNA, 30 nt, synthetic construct
  source 1..30: mol_type = other RNA
aaataaataaataaaaaaaaaataaatata

SEQ ID NO: 5900 - RNA, 30 nt, synthetic construct
  source 1..30: mol_type = other RNA
aaataaataaaaaaaaaataaataaatata

SEQ ID NO: 5901 - RNA, 30 nt, synthetic construct
  source 1..30: mol_type = other RNA
aaataaaaaaaaaataaataaataaatata

SEQ ID NO: 5902 - RNA, 30 nt, synthetic construct
  source 1..30: mol_type = other RNA
aaataaataaataaataaataaaaaatata

SEQ ID NO: 5903 - RNA, 30 nt, synthetic construct
  source 1..30: mol_type = other RNA
aaataaataaataaataaaaaataaatata

SEQ ID NO: 5904 - RNA, 30 nt, synthetic construct
  source 1..30: mol_type = other RNA
aaataaataaaaaataaataaataaatata

SEQ ID NO: 5905 - RNA, 30 nt, synthetic construct
  source 1..30: mol_type = other RNA
aaataaaaaataaataaataaataaatata

SEQ ID NO: 5906 - RNA, 30 nt, synthetic construct
  source 1..30: mol_type = other RNA
aaaaaaaaaaaaaaaaaaaataaatatata

SEQ ID NO: 5907 - RNA, 30 nt, synthetic construct
  source 1..30: mol_type = other RNA
aaaaaaaaaaaaaaaaaaaaaaaaaaataa

SEQ ID NO: 5908 - RNA, 30 nt, synthetic construct
  source 1..30: mol_type = other RNA
aaaaaaaaaaaaaaaataaataaatatata

SEQ ID NO: 5909 - RNA, 30 nt, synthetic construct
  source 1..30: mol_type = other RNA
aaaaaaaaaaaaaaaaaaaaaaataaataa

SEQ ID NO: 5910 - RNA, 30 nt, synthetic construct
  source 1..30: mol_type = other RNA
aaaaaaaaaaaataaataaataaatatata

SEQ ID NO: 5911 - RNA, 30 nt, synthetic construct
  source 1..30: mol_type = other RNA
aaaaaaaaaaaaaaaaaaataaataaataa

SEQ ID NO: 5912 - RNA, 30 nt, synthetic construct
  source 1..30: mol_type = other RNA
aaaaaaaataaataaataaataaatatata

SEQ ID NO: 5913 - RNA, 30 nt, synthetic construct
  source 1..30: mol_type = other RNA
aaaaaaaaaaaaaaaaaaaaaaaaaataaa

SEQ ID NO: 5914 - RNA, 30 nt, synthetic construct
  source 1..30: mol_type = other RNA
aaaaaaaaaaaaaaataaataaataaataa

SEQ ID NO: 5915 - RNA, 30 nt, synthetic construct
  source 1..30: mol_type = other RNA
aaaataaataaataaataaataaatatata

SEQ ID NO: 5916 - RNA, 30 nt, synthetic construct
  source 1..30: mol_type = other RNA
aaaaaaaaaaaaaaaaaaaaaataaataaa

SEQ ID NO: 5917 - RNA, 30 nt, synthetic construct
  source 1..30: mol_type = other RNA
aaaaaaaaaaataaataaataaataaataa

SEQ ID NO: 5918 - RNA, 30 nt, synthetic construct
  source 1..30: mol_type = other RNA
aaaaaaaaaaaaaaaaaataaataaataaa

SEQ ID NO: 5919 - RNA, 30 nt, synthetic construct
  source 1..30: mol_type = other RNA
aaaaaaataaataaataaataaataaataa

SEQ ID NO: 5920 - RNA, 30 nt, synthetic construct
  source 1..30: mol_type = other RNA
aaaaaaaaaaaaaataaataaataaataaa

SEQ ID NO: 5921 - RNA, 30 nt, synthetic construct
  source 1..30: mol_type = other RNA
aaaaaaaaaataaataaataaataaataaa

SEQ ID NO: 5922 - RNA, 30 nt, synthetic construct
  source 1..30: mol_type = other RNA
aaaaaataaataaataaataaataaataaa

SEQ ID NO: 5923 - RNA, 30 nt, synthetic construct
  source 1..30: mol_type = other RNA
aaaaaaaaaaaaaaaaaaaaaaaaaaatat

SEQ ID NO: 5924 - RNA, 30 nt, synthetic construct
  source 1..30: mol_type = other RNA
aaaaaaaaaaaaaaaaaaaaaaataaatat

SEQ ID NO: 5925 - RNA, 30 nt, synthetic construct
  source 1..30: mol_type = other RNA
aaaaaaaaaaaaaaaaaaataaataaatat

SEQ ID NO: 5926 - RNA, 30 nt, synthetic construct
  source 1..30: mol_type = other RNA
aaaaaaaaaaaaaaataaataaataaatat

SEQ ID NO: 5927 - RNA, 30 nt, synthetic construct
  source 1..30: mol_type = other RNA
aaaaaaaaaaataaataaataaataaatat

SEQ ID NO: 5928 - RNA, 30 nt, synthetic construct
  source 1..30: mol_type = other RNA
aaaaaaataaataaataaataaataaatat

SEQ ID NO: 5929 - RNA, 30 nt, synthetic construct
  source 1..30: mol_type = other RNA
aaataaatataaataaataaatataaataa

SEQ ID NO: 5930 - RNA, 30 nt, synthetic construct
  source 1..30: mol_type = other RNA
aaataaatataaataaatataaataaataa

SEQ ID NO: 5931 - RNA, 30 nt, synthetic construct
  source 1..30: mol_type = other RNA
aaataaatataaataaataaataaatataa

SEQ ID NO: 5932 - RNA, 30 nt, synthetic construct
  source 1..30: mol_type = other RNA
aaatataaataaataaataaatataaataa

SEQ ID NO: 5933 - RNA, 30 nt, synthetic construct
  source 1..30: mol_type = other RNA
aaataaataaatataaatataaataaataa

SEQ ID NO: 5934 - RNA, 30 nt, synthetic construct
  source 1..30: mol_type = other RNA
aaataaataaatataaataaataaatataa

SEQ ID NO: 5935 - RNA, 30 nt, synthetic construct
  source 1..30: mol_type = other RNA
aaatataaataaataaataaataaatataa

SEQ ID NO: 5936 - RNA, 30 nt, synthetic construct
  source 1..30: mol_type = other RNA
aaataaataaatataaataaatataaataa

SEQ ID NO: 5937 - RNA, 30 nt, synthetic construct
  source 1..30: mol_type = other RNA
aaatataaatataaataaataaataaataa

SEQ ID NO: 5938 - RNA, 30 nt, synthetic construct
  source 1..30: mol_type = other RNA
aaatataaataaataaatataaataaataa

SEQ ID NO: 5939 - RNA, 30 nt, synthetic construct
  source 1..30: mol_type = other RNA
aaataaataaataaatataaatataaataa

SEQ ID NO: 5940 - RNA, 30 nt, synthetic construct
  source 1..30: mol_type = other RNA
aaataaataaataaatataaataaatataa

SEQ ID NO: 5941 - RNA, 30 nt, synthetic construct
  source 1..30: mol_type = other RNA
aaatataaataaatataaataaataaataa

SEQ ID NO: 5942 - RNA, 30 nt, synthetic construct
  source 1..30: mol_type = other RNA
aaataaataaataaataaatataaatataa

SEQ ID NO: 5943 - RNA, 30 nt, synthetic construct
  source 1..30: mol_type = other RNA
aaataaataaataaataaataataaatata

SEQ ID NO: 5944 - RNA, 30 nt, synthetic construct
  source 1..30: mol_type = other RNA
aaataaataaataaataaataaataatata

SEQ ID NO: 5945 - RNA, 30 nt, synthetic construct
  source 1..30: mol_type = other RNA
aaataaataaataaataataaataaatata

SEQ ID NO: 5946 - RNA, 30 nt, synthetic construct
  source 1..30: mol_type = other RNA
aaataaataataaataaataaataaatata

SEQ ID NO: 5947 - RNA, 30 nt, synthetic construct
  source 1..30: mol_type = other RNA
aaataataaataaataaataaataaatata

SEQ ID NO: 5948 - RNA, 30 nt, synthetic construct
  source 1..30: mol_type = other RNA
aaaaaaaaaaaaaaaaaaaaaaaaaaaata

SEQ ID NO: 5949 - RNA, 30 nt, synthetic construct
  source 1..30: mol_type = other RNA
aaaaaaaaaaaaaaaaaaaaaaaataaata

SEQ ID NO: 5950 - RNA, 30 nt, synthetic construct
  source 1..30: mol_type = other RNA
aaataaataaataaataaataaatatataa

SEQ ID NO: 5951 - RNA, 30 nt, synthetic construct
  source 1..30: mol_type = other RNA
aaataaataaatatataaataaataaataa

SEQ ID NO: 5952 - RNA, 30 nt, synthetic construct
  source 1..30: mol_type = other RNA
aaatatataaataaataaataaataaataa

SEQ ID NO: 5953 - RNA, 30 nt, synthetic construct
  source 1..30: mol_type = other RNA
aaataaatatataaataaataaataaataa

SEQ ID NO: 5954 - RNA, 30 nt, synthetic construct
  source 1..30: mol_type = other RNA
aaataaataaataaataaatatataaataa

SEQ ID NO: 5955 - RNA, 30 nt, synthetic construct
  source 1..30: mol_type = other RNA
aaataaataaataaatatataaataaataa

SEQ ID NO: 5956 - RNA, 30 nt, synthetic construct
  source 1..30: mol_type = other RNA
aaaaaaaaaaaaaatataaatataaatata

SEQ ID NO: 5957 - RNA, 30 nt, synthetic construct
  source 1..30: mol_type = other RNA
aaataaatataaataaatataaataaatat

SEQ ID NO: 5958 - RNA, 30 nt, synthetic construct
  source 1..30: mol_type = other RNA
aaataaatataaataaataaatataaatat

SEQ ID NO: 5959 - RNA, 30 nt, synthetic construct
  source 1..30: mol_type = other RNA
aaatataaataaataaataaatataaatat

SEQ ID NO: 5960 - RNA, 30 nt, synthetic construct
  source 1..30: mol_type = other RNA
aaatataaatataaataaataaataaatat

SEQ ID NO: 5961 - RNA, 30 nt, synthetic construct
  source 1..30: mol_type = other RNA
aaataaataaatataaatataaataaatat

SEQ ID NO: 5962 - RNA, 30 nt, synthetic construct
  source 1..30: mol_type = other RNA
aaatataaataaataaatataaataaatat

SEQ ID NO: 5963 - RNA, 30 nt, synthetic construct
  source 1..30: mol_type = other RNA
aaatataaataaatataaataaataaatat

SEQ ID NO: 5964 - RNA, 30 nt, synthetic construct
  source 1..30: mol_type = other RNA
aaataaatataaatataaataaataaatat

SEQ ID NO: 5965 - RNA, 30 nt, synthetic construct
  source 1..30: mol_type = other RNA
aaataaataaatataaataaatataaatat

SEQ ID NO: 5966 - RNA, 30 nt, synthetic construct
  source 1..30: mol_type = other RNA
aaataaataaataaatataaatataaatat

SEQ ID NO: 5967 - RNA, 30 nt, synthetic construct
  source 1..30: mol_type = other RNA
aaaaaaaaaaaaaaaaaaaataaataaata

SEQ ID NO: 5968 - RNA, 30 nt, synthetic construct
  source 1..30: mol_type = other RNA
aaaaaaaaaatataaatataaataaatata

SEQ ID NO: 5969 - RNA, 30 nt, synthetic construct
  source 1..30: mol_type = other RNA
aaaaaaaaaataaatataaatataaatata

SEQ ID NO: 5970 - RNA, 30 nt, synthetic construct
  source 1..30: mol_type = other RNA
aaaaaaaaaatataaataaatataaatata

SEQ ID NO: 5971 - RNA, 30 nt, synthetic construct
  source 1..30: mol_type = other RNA
aaaaaaaaaaaaaaaataaataaataaata

SEQ ID NO: 5972 - RNA, 30 nt, synthetic construct
  source 1..30: mol_type = other RNA
aaaaaatataaatataaataaataaatata

SEQ ID NO: 5973 - RNA, 30 nt, synthetic construct
  source 1..30: mol_type = other RNA
aaaaaatataaataaatataaataaatata

SEQ ID NO: 5974 - RNA, 30 nt, synthetic construct
  source 1..30: mol_type = other RNA
aaaaaatataaataaataaatataaatata

SEQ ID NO: 5975 - RNA, 30 nt, synthetic construct
  source 1..30: mol_type = other RNA
aaaaaataaatataaataaatataaatata

SEQ ID NO: 5976 - RNA, 30 nt, synthetic construct
  source 1..30: mol_type = other RNA
aaaaaataaatataaatataaataaatata

SEQ ID NO: 5977 - RNA, 30 nt, synthetic construct
  source 1..30: mol_type = other RNA
aaaaaataaataaatataaatataaatata

SEQ ID NO: 5978 - RNA, 30 nt, synthetic construct
  source 1..30: mol_type = other RNA
aaaaaaaaaaaataaataaataaataaata

SEQ ID NO: 5979 - RNA, 30 nt, synthetic construct
  source 1..30: mol_type = other RNA
aaatataaaaaaaaaaaaaaaaaaaatata

SEQ ID NO: 5980 - RNA, 30 nt, synthetic construct
  source 1..30: mol_type = other RNA
aaataaaaaaaaaaaaaaaatataaatata

SEQ ID NO: 5981 - RNA, 30 nt, synthetic construct
  source 1..30: mol_type = other RNA
aaatataaaaaaaaaaaaaaaataaatata

SEQ ID NO: 5982 - RNA, 30 nt, synthetic construct
  source 1..30: mol_type = other RNA
aaatataaataaaaaaaaaaaaaaaatata

SEQ ID NO: 5983 - RNA, 30 nt, synthetic construct
  source 1..30: mol_type = other RNA
aaataaatataaaaaaaaaaaaaaaatata

SEQ ID NO: 5984 - RNA, 30 nt, synthetic construct
  source 1..30: mol_type = other RNA
aaaataaataaataaataaataaataaata

SEQ ID NO: 5985 - RNA, 30 nt, synthetic construct
  source 1..30: mol_type = other RNA
aaatataaaaaaaaaaaataaataaatata

SEQ ID NO: 5986 - RNA, 30 nt, synthetic construct
  source 1..30: mol_type = other RNA
aaataaaaaaaaaaaatataaataaatata

SEQ ID NO: 5987 - RNA, 30 nt, synthetic construct
  source 1..30: mol_type = other RNA
aaataaaaaaaaaaaataaatataaatata

SEQ ID NO: 5988 - RNA, 30 nt, synthetic construct
  source 1..30: mol_type = other RNA
aaataaataaaaaaaaaaaatataaatata

SEQ ID NO: 5989 - RNA, 30 nt, synthetic construct
  source 1..30: mol_type = other RNA
aaataaatataaaaaaaaaaaataaatata

SEQ ID NO: 5990 - RNA, 30 nt, synthetic construct
  source 1..30: mol_type = other RNA
aaatataaataaaaaaaaaaaataaatata

SEQ ID NO: 5991 - RNA, 30 nt, synthetic construct
  source 1..30: mol_type = other RNA
aaataaataaatataaaaaaaaaaaatata

SEQ ID NO: 5992 - RNA, 30 nt, synthetic construct
  source 1..30: mol_type = other RNA
aaataaatataaataaaaaaaaaaaatata

SEQ ID NO: 5993 - RNA, 30 nt, synthetic construct
  source 1..30: mol_type = other RNA
aaatataaataaataaaaaaaaaaaatata

SEQ ID NO: 5994 - RNA, 30 nt, synthetic construct
  source 1..30: mol_type = other RNA
aaataaaaaaaataaatataaataaatata

SEQ ID NO: 5995 - RNA, 30 nt, synthetic construct
  source 1..30: mol_type = other RNA
aaataaataaataaatataaaaaaaatata

SEQ ID NO: 5996 - RNA, 30 nt, synthetic construct
  source 1..30: mol_type = other RNA
aaataaataaataaaaaaaatataaatata

SEQ ID NO: 5997 - RNA, 30 nt, synthetic construct
  source 1..30: mol_type = other RNA
aaataaataaaaaaaataaatataaatata

SEQ ID NO: 5998 - RNA, 30 nt, synthetic construct
  source 1..30: mol_type = other RNA
aaataaataaatataaataaaaaaaatata

SEQ ID NO: 5999 - RNA, 30 nt, synthetic construct
  source 1..30: mol_type = other RNA
aaataaatataaataaaaaaaataaatata

SEQ ID NO: 6000 - RNA, 30 nt, synthetic construct
  source 1..30: mol_type = other RNA
aaataaatataaataaataaaaaaaatata

SEQ ID NO: 6001 - RNA, 30 nt, synthetic construct
  source 1..30: mol_type = other RNA
aaataaataaatataaaaaaaataaatata

SEQ ID NO: 6002 - RNA, 30 nt, synthetic construct
  source 1..30: mol_type = other RNA
aaatataaataaaaaaaataaataaatata

SEQ ID NO: 6003 - RNA, 30 nt, synthetic construct
  source 1..30: mol_type = other RNA
aaatataaataaataaaaaaaataaatata

SEQ ID NO: 6004 - RNA, 30 nt, synthetic construct
  source 1..30: mol_type = other RNA
aaataaataaaaaaaatataaataaatata

SEQ ID NO: 6005 - RNA, 30 nt, synthetic construct
  source 1..30: mol_type = other RNA
aaataaatataaaaaaaataaataaatata

SEQ ID NO: 6006 - RNA, 30 nt, synthetic construct
  source 1..30: mol_type = other RNA
aaataaaaaaaataaataaatataaatata

SEQ ID NO: 6007 - RNA, 30 nt, synthetic construct
  source 1..30: mol_type = other RNA
aaatataaataaataaataaaaaaaatata

SEQ ID NO: 6008 - RNA, 30 nt, synthetic construct
  source 1..30: mol_type = other RNA
aaatataaaaaaaataaataaataaatata

SEQ ID NO: 6009 - RNA, 30 nt, synthetic construct
  source 1..30: mol_type = other RNA
aaataaaaaaaatataaataaataaatata

SEQ ID NO: 6010 - RNA, 30 nt, synthetic construct
  source 1..30: mol_type = other RNA
aaataaaataaatataaataaataaatata

SEQ ID NO: 6011 - RNA, 30 nt, synthetic construct
  source 1..30: mol_type = other RNA
aaataaataaataaataaatataaaatata

SEQ ID NO: 6012 - RNA, 30 nt, synthetic construct
  source 1..30: mol_type = other RNA
aaataaataaataaataaaatataaatata

SEQ ID NO: 6013 - RNA, 30 nt, synthetic construct
  source 1..30: mol_type = other RNA
aaataaaataaataaatataaataaatata

SEQ ID NO: 6014 - RNA, 30 nt, synthetic construct
  source 1..30: mol_type = other RNA
aaataaataaataaaataaatataaatata

SEQ ID NO: 6015 - RNA, 30 nt, synthetic construct
  source 1..30: mol_type = other RNA
aaataaatataaataaataaaataaatata

SEQ ID NO: 6016 - RNA, 30 nt, synthetic construct
  source 1..30: mol_type = other RNA
aaataaatataaataaataaataaaatata

SEQ ID NO: 6017 - RNA, 30 nt, synthetic construct
  source 1..30: mol_type = other RNA
aaataaataaatataaaataaataaatata

SEQ ID NO: 6018 - RNA, 30 nt, synthetic construct
  source 1..30: mol_type = other RNA
aaataaataaatataaataaaataaatata

SEQ ID NO: 6019 - RNA, 30 nt, synthetic construct
  source 1..30: mol_type = other RNA
aaataaataaataaatataaaataaatata

SEQ ID NO: 6020 - RNA, 30 nt, synthetic construct
  source 1..30: mol_type = other RNA
aaatataaataaataaaataaataaatata

SEQ ID NO: 6021 - RNA, 30 nt, synthetic construct
  source 1..30: mol_type = other RNA
aaataaatataaaataaataaataaatata

SEQ ID NO: 6022 - RNA, 30 nt, synthetic construct
  source 1..30: mol_type = other RNA
aaataaataaatataaataaataaaatata

SEQ ID NO: 6023 - RNA, 30 nt, synthetic construct
  source 1..30: mol_type = other RNA
aaatataaataaataaataaataaaatata

SEQ ID NO: 6024 - RNA, 30 nt, synthetic construct
  source 1..30: mol_type = other RNA
aaataaataaaataaataaatataaatata

SEQ ID NO: 6025 - RNA, 30 nt, synthetic construct
  source 1..30: mol_type = other RNA
aaatataaaataaataaataaataaatata

SEQ ID NO: 6026 - RNA, 30 nt, synthetic construct
  source 1..30: mol_type = other RNA
aaataaataaataaatataaataaaatata

SEQ ID NO: 6027 - RNA, 30 nt, synthetic construct
  source 1..30: mol_type = other RNA
aaataaataaaatataaataaataaatata

SEQ ID NO: 6028 - RNA, 30 nt, synthetic construct
  source 1..30: mol_type = other RNA
aaataaaatataaataaataaataaatata

SEQ ID NO: 6029 - RNA, 30 nt, synthetic construct
  source 1..30: mol_type = other RNA
aaatataaataaataaataaaataaatata

SEQ ID NO: 6030 - RNA, 30 nt, synthetic construct
  source 1..30: mol_type = other RNA
aaatataaataaaataaataaataaatata

SEQ ID NO: 6031 - RNA, 30 nt, synthetic construct
  source 1..30: mol_type = other RNA
aaaaaaaaaaaaaaaaaatatataaatata

SEQ ID NO: 6032 - RNA, 30 nt, synthetic construct
  source 1..30: mol_type = other RNA
aaaaaaaaaaaaaaaaaatataaatatata

SEQ ID NO: 6033 - RNA, 30 nt, synthetic construct
  source 1..30: mol_type = other RNA
aaaaaaaaaaaaaaaaaaaaaaaaatataa

SEQ ID NO: 6034 - RNA, 30 nt, synthetic construct
  source 1..30: mol_type = other RNA
aaaaaaaaaaaaaatataaataaatatata

SEQ ID NO: 6035 - RNA, 30 nt, synthetic construct
  source 1..30: mol_type = other RNA
aaaaaaaaaaaaaatatataaataaatata

SEQ ID NO: 6036 - RNA, 30 nt, synthetic construct
  source 1..30: mol_type = other RNA
aaaaaaaaaaaaaataaatatataaatata

SEQ ID NO: 6037 - RNA, 30 nt, synthetic construct
  source 1..30: mol_type = other RNA
aaaaaaaaaaaaaataaatataaatatata

SEQ ID NO: 6038 - RNA, 30 nt, synthetic construct
  source 1..30: mol_type = other RNA
aaataaatataaataaataaataaatatat

SEQ ID NO: 6039 - RNA, 30 nt, synthetic construct
  source 1..30: mol_type = other RNA
aaatataaataaataaataaataaatatat

SEQ ID NO: 6040 - RNA, 30 nt, synthetic construct
  source 1..30: mol_type = other RNA
aaataaatatataaataaataaataaatat

SEQ ID NO: 6041 - RNA, 30 nt, synthetic construct
  source 1..30: mol_type = other RNA
aaataaataaatataaataaataaatatat

SEQ ID NO: 6042 - RNA, 30 nt, synthetic construct
  source 1..30: mol_type = other RNA
aaataaataaataaataaatataaatatat

SEQ ID NO: 6043 - RNA, 30 nt, synthetic construct
  source 1..30: mol_type = other RNA
aaataaataaatatataaataaataaatat

SEQ ID NO: 6044 - RNA, 30 nt, synthetic construct
  source 1..30: mol_type = other RNA
aaataaataaataaataaatatataaatat

SEQ ID NO: 6045 - RNA, 30 nt, synthetic construct
  source 1..30: mol_type = other RNA
aaataaataaataaatatataaataaatat

SEQ ID NO: 6046 - RNA, 30 nt, synthetic construct
  source 1..30: mol_type = other RNA
aaaaaaaaaaaaaaaaaaaaataaatataa

SEQ ID NO: 6047 - RNA, 30 nt, synthetic construct
  source 1..30: mol_type = other RNA
aaaaaaaaaaaaaaaaaaaaatataaataa

SEQ ID NO: 6048 - RNA, 30 nt, synthetic construct
  source 1..30: mol_type = other RNA
aaaaaaaaaatatataaataaataaatata

SEQ ID NO: 6049 - RNA, 30 nt, synthetic construct
  source 1..30: mol_type = other RNA
aaaaaaaaaataaatatataaataaatata

SEQ ID NO: 6050 - RNA, 30 nt, synthetic construct
  source 1..30: mol_type = other RNA
aaaaaaaaaataaataaatatataaatata

SEQ ID NO: 6051 - RNA, 30 nt, synthetic construct
  source 1..30: mol_type = other RNA
aaaaaaaaaataaatataaataaatatata

SEQ ID NO: 6052 - RNA, 30 nt, synthetic construct
  source 1..30: mol_type = other RNA
aaaaaaaaaatataaataaataaatatata

SEQ ID NO: 6053 - RNA, 30 nt, synthetic construct
  source 1..30: mol_type = other RNA
aaaaaaaaaataaataaatataaatatata

SEQ ID NO: 6054 - RNA, 30 nt, synthetic construct
  source 1..30: mol_type = other RNA
aaaaaaaaaaaaaaaaataaataaatataa

SEQ ID NO: 6055 - RNA, 30 nt, synthetic construct
  source 1..30: mol_type = other RNA
aaaaaaaaaaaaaaaaataaatataaataa

SEQ ID NO: 6056 - RNA, 30 nt, synthetic construct
  source 1..30: mol_type = other RNA
aaaaaaaaaaaaaaaaatataaataaataa

SEQ ID NO: 6057 - RNA, 30 nt, synthetic construct
  source 1..30: mol_type = other RNA
aaaaaatatataaataaataaataaatata

SEQ ID NO: 6058 - RNA, 30 nt, synthetic construct
  source 1..30: mol_type = other RNA
aaaaaataaatatataaataaataaatata

SEQ ID NO: 6059 - RNA, 30 nt, synthetic construct
  source 1..30: mol_type = other RNA
aaaaaataaataaataaatatataaatata

SEQ ID NO: 6060 - RNA, 30 nt, synthetic construct
  source 1..30: mol_type = other RNA
aaaaaataaataaatatataaataaatata

SEQ ID NO: 6061 - RNA, 30 nt, synthetic construct
  source 1..30: mol_type = other RNA
aaaaaataaatataaataaataaatatata

SEQ ID NO: 6062 - RNA, 30 nt, synthetic construct
  source 1..30: mol_type = other RNA
aaaaaataaataaataaatataaatatata

SEQ ID NO: 6063 - RNA, 30 nt, synthetic construct
  source 1..30: mol_type = other RNA
aaaaaataaataaatataaataaatatata

SEQ ID NO: 6064 - RNA, 30 nt, synthetic construct
  source 1..30: mol_type = other RNA
aaaaaaaaaaaaaaaaaaaaaaaatataaa

SEQ ID NO: 6065 - RNA, 30 nt, synthetic construct
  source 1..30: mol_type = other RNA
aataaataaataaataaataaataaataaa

SEQ ID NO: 6066 - RNA, 30 nt, synthetic construct
  source 1..30: mol_type = other RNA
aaaaaaaaaaaaatataaataaataaataa

SEQ ID NO: 6067 - RNA, 30 nt, synthetic construct
  source 1..30: mol_type = other RNA
aaaaaaaaaaaaataaataaatataaataa

SEQ ID NO: 6068 - RNA, 30 nt, synthetic construct
  source 1..30: mol_type = other RNA
aaaaaaaaaaaaataaatataaataaataa

SEQ ID NO: 6069 - RNA, 30 nt, synthetic construct
  source 1..30: mol_type = other RNA
aaaaaaaaaaaaataaataaataaatataa

SEQ ID NO: 6070 - RNA, 31 nt, synthetic construct
  source 1..31: mol_type = other RNA
aaataaataaataaataaataaataaatata

SEQ ID NO: 6071 - RNA, 31 nt, synthetic construct
  source 1..31: mol_type = other RNA
aaataaataaataaataaataaataaataaa

SEQ ID NO: 6072 - RNA, 31 nt, synthetic construct
  source 1..31: mol_type = other RNA
aaaaaaaaaaaaaaaaaaaaaaaaaaatata

SEQ ID NO: 6073 - RNA, 31 nt, synthetic construct
  source 1..31: mol_type = other RNA
aaaaaaaaaaaaaaaaaaaaaaataaatata

SEQ ID NO: 6074 - RNA, 31 nt, synthetic construct
  source 1..31: mol_type = other RNA
aaaaaaaaaaaaaaaaaaataaataaatata

SEQ ID NO: 6075 - RNA, 31 nt, synthetic construct
  source 1..31: mol_type = other RNA
aaaaaaaaaaaaaaataaataaataaatata

SEQ ID NO: 6076 - RNA, 31 nt, synthetic construct
  source 1..31: mol_type = other RNA
aaaaaaaaaaataaataaataaataaatata

SEQ ID NO: 6077 - RNA, 31 nt, synthetic construct
  source 1..31: mol_type = other RNA
aaaaaaataaataaataaataaataaatata

SEQ ID NO: 6078 - RNA, 31 nt, synthetic construct
  source 1..31: mol_type = other RNA
aaatataaatataaataaataaataaatata

SEQ ID NO: 6079 - RNA, 31 nt, synthetic construct
  source 1..31: mol_type = other RNA
aaataaataaatataaataaatataaatata

SEQ ID NO: 6080 - RNA, 31 nt, synthetic construct
  source 1..31: mol_type = other RNA
aaataaataaataaatataaatataaatata

SEQ ID NO: 6081 - RNA, 31 nt, synthetic construct
  source 1..31: mol_type = other RNA
aaatataaataaataaataaatataaatata

SEQ ID NO: 6082 - RNA, 31 nt, synthetic construct
  source 1..31: mol_type = other RNA
aaataaataaatataaatataaataaatata

SEQ ID NO: 6083 - RNA, 31 nt, synthetic construct
  source 1..31: mol_type = other RNA
aaataaatataaataaatataaataaatata

SEQ ID NO: 6084 - RNA, 31 nt, synthetic construct
  source 1..31: mol_type = other RNA
aaataaatataaatataaataaataaatata

SEQ ID NO: 6085 - RNA, 31 nt, synthetic construct
  source 1..31: mol_type = other RNA
aaataaatataaataaataaatataaatata

SEQ ID NO: 6086 - RNA, 31 nt, synthetic construct
  source 1..31: mol_type = other RNA
aaatataaataaatataaataaataaatata

SEQ ID NO: 6087 - RNA, 31 nt, synthetic construct
  source 1..31: mol_type = other RNA
aaataaataaatataaataaataaatatata

SEQ ID NO: 6088 - RNA, 31 nt, synthetic construct
  source 1..31: mol_type = other RNA
aaataaatataaataaataaataaatatata

SEQ ID NO: 6089 - RNA, 31 nt, synthetic construct
  source 1..31: mol_type = other RNA
aaatataaataaataaataaataaatatata

SEQ ID NO: 6090 - RNA, 31 nt, synthetic construct
  source 1..31: mol_type = other RNA
aaataaataaataaatatataaataaatata

SEQ ID NO: 6091 - RNA, 31 nt, synthetic construct
  source 1..31: mol_type = other RNA
aaataaataaatatataaataaataaatata

SEQ ID NO: 6092 - RNA, 31 nt, synthetic construct
  source 1..31: mol_type = other RNA
aaataaatatataaataaataaataaatata

SEQ ID NO: 6093 - RNA, 31 nt, synthetic construct
  source 1..31: mol_type = other RNA
aaatatataaataaataaataaataaatata

SEQ ID NO: 6094 - RNA, 31 nt, synthetic construct
  source 1..31: mol_type = other RNA
aaataaataaataaatataaataaatatata

SEQ ID NO: 6095 - RNA, 31 nt, synthetic construct
  source 1..31: mol_type = other RNA
aaataaataaataaataaatataaatatata

SEQ ID NO: 6096 - RNA, 31 nt, synthetic construct
  source 1..31: mol_type = other RNA
aaataaataaataaataaatatataaatata

SEQ ID NO: 6097 - RNA, 31 nt, synthetic construct
  source 1..31: mol_type = other RNA
aaataaataaataaataaataaatatatata

SEQ ID NO: 6098 - RNA, 31 nt, synthetic construct
  source 1..31: mol_type = other RNA
aaaaaaaaaaaaaaaaaaaaatataaatata

SEQ ID NO: 6099 - RNA, 31 nt, synthetic construct
  source 1..31: mol_type = other RNA
aaaaaaaaaaaaaaaaataaatataaatata

SEQ ID NO: 6100 - RNA, 31 nt, synthetic construct
  source 1..31: mol_type = other RNA
aaaaaaaaaaaaaaaaatataaataaatata

SEQ ID NO: 6101 - RNA, 31 nt, synthetic construct
  source 1..31: mol_type = other RNA
aaaaaaaaaaaaataaatataaataaatata

SEQ ID NO: 6102 - RNA, 31 nt, synthetic construct
  source 1..31: mol_type = other RNA
aaaaaaaaaaaaataaataaatataaatata

SEQ ID NO: 6103 - RNA, 31 nt, synthetic construct
  source 1..31: mol_type = other RNA
aaaaaaaaaaaaatataaataaataaatata

SEQ ID NO: 6104 - RNA, 31 nt, synthetic construct
  source 1..31: mol_type = other RNA
aaaaaaaaataaataaataaatataaatata

SEQ ID NO: 6105 - RNA, 31 nt, synthetic construct
  source 1..31: mol_type = other RNA
aaaaaaaaatataaataaataaataaatata

SEQ ID NO: 6106 - RNA, 31 nt, synthetic construct
  source 1..31: mol_type = other RNA
aaaaaaaaataaatataaataaataaatata

SEQ ID NO: 6107 - RNA, 31 nt, synthetic construct
  source 1..31: mol_type = other RNA
aaaaaaaaataaataaatataaataaatata

SEQ ID NO: 6108 - RNA, 31 nt, synthetic construct
  source 1..31: mol_type = other RNA
aaaaataaataaataaataaatataaatata

SEQ ID NO: 6109 - RNA, 31 nt, synthetic construct
  source 1..31: mol_type = other RNA
aaaaataaatataaataaataaataaatata

SEQ ID NO: 6110 - RNA, 31 nt, synthetic construct
  source 1..31: mol_type = other RNA
aaaaatataaataaataaataaataaatata

SEQ ID NO: 6111 - RNA, 31 nt, synthetic construct
  source 1..31: mol_type = other RNA
aaaaataaataaatataaataaataaatata

SEQ ID NO: 6112 - RNA, 31 nt, synthetic construct
  source 1..31: mol_type = other RNA
aaaaataaataaataaatataaataaatata

SEQ ID NO: 6113 - RNA, 31 nt, synthetic construct
  source 1..31: mol_type = other RNA
aaataaaaaaaaaaaaaaaaaaaaaaatata

SEQ ID NO: 6114 - RNA, 31 nt, synthetic construct
  source 1..31: mol_type = other RNA
aaataaataaaaaaaaaaaaaaaaaaatata

SEQ ID NO: 6115 - RNA, 31 nt, synthetic construct
  source 1..31: mol_type = other RNA
aaataaaaaaaaaaaaaaaaaaataaatata

SEQ ID NO: 6116 - RNA, 31 nt, synthetic construct
  source 1..31: mol_type = other RNA
aaataaataaaaaaaaaaaaaaataaatata

SEQ ID NO: 6117 - RNA, 31 nt, synthetic construct
  source 1..31: mol_type = other RNA
aaataaaaaaaaaaaaaaataaataaatata

SEQ ID NO: 6118 - RNA, 31 nt, synthetic construct
  source 1..31: mol_type = other RNA
aaataaataaataaaaaaaaaaaaaaatata

SEQ ID NO: 6119 - RNA, 31 nt, synthetic construct
  source 1..31: mol_type = other RNA
aaataaataaataaataaataaataaataat

SEQ ID NO: 6120 - RNA, 31 nt, synthetic construct
  source 1..31: mol_type = other RNA
aaataaaaaaaaaaataaataaataaatata

SEQ ID NO: 6121 - RNA, 31 nt, synthetic construct
  source 1..31: mol_type = other RNA
aaataaataaaaaaaaaaataaataaatata

SEQ ID NO: 6122 - RNA, 31 nt, synthetic construct
  source 1..31: mol_type = other RNA
aaataaataaataaaaaaaaaaataaatata

SEQ ID NO: 6123 - RNA, 31 nt, synthetic construct
  source 1..31: mol_type = other RNA
aaataaataaataaataaaaaaaaaaatata

SEQ ID NO: 6124 - RNA, 31 nt, synthetic construct
  source 1..31: mol_type = other RNA
aaaaaaaaaaaaaaaaaaaaaaaaatatata

SEQ ID NO: 6125 - RNA, 31 nt, synthetic construct
  source 1..31: mol_type = other RNA
aaaaaaaaaaaaaaaaaaaaataaatatata

SEQ ID NO: 6126 - RNA, 31 nt, synthetic construct
  source 1..31: mol_type = other RNA
aaataaaaaaataaataaataaataaatata

SEQ ID NO: 6127 - RNA, 31 nt, synthetic construct
  source 1..31: mol_type = other RNA
aaataaataaataaataaaaaaataaatata

SEQ ID NO: 6128 - RNA, 31 nt, synthetic construct
  source 1..31: mol_type = other RNA
aaataaataaaaaaataaataaataaatata

SEQ ID NO: 6129 - RNA, 31 nt, synthetic construct
  source 1..31: mol_type = other RNA
aaataaataaataaaaaaataaataaatata

SEQ ID NO: 6130 - RNA, 31 nt, synthetic construct
  source 1..31: mol_type = other RNA
aaataaataaataaataaataaaaaaatata

SEQ ID NO: 6131 - RNA, 31 nt, synthetic construct
  source 1..31: mol_type = other RNA
aaaaaaaaaaaaaaaaaaaaaaaaaaaataa

SEQ ID NO: 6132 - RNA, 31 nt, synthetic construct
  source 1..31: mol_type = other RNA
aaaaaaaaaaaaaaaaataaataaatatata

SEQ ID NO: 6133 - RNA, 31 nt, synthetic construct
  source 1..31: mol_type = other RNA
aaaaaaaaaaaaaaaaaaaaaaaataaataa

SEQ ID NO: 6134 - RNA, 31 nt, synthetic construct
  source 1..31: mol_type = other RNA
aaaaaaaaaaaaataaataaataaatatata

SEQ ID NO: 6135 - RNA, 31 nt, synthetic construct
  source 1..31: mol_type = other RNA
aaaaaaaaaaaaaaaaaaaataaataaataa

SEQ ID NO: 6136 - RNA, 31 nt, synthetic construct
  source 1..31: mol_type = other RNA
aaaaaaaaataaataaataaataaatatata

SEQ ID NO: 6137 - RNA, 31 nt, synthetic construct
  source 1..31: mol_type = other RNA
aaaaaaaaaaaaaaaaaaaaaaaaaaataaa

SEQ ID NO: 6138 - RNA, 31 nt, synthetic construct
  source 1..31: mol_type = other RNA
aaaaaaaaaaaaaaaataaataaataaataa

SEQ ID NO: 6139 - RNA, 31 nt, synthetic construct
  source 1..31: mol_type = other RNA
aaaaataaataaataaataaataaatatata

SEQ ID NO: 6140 - RNA, 31 nt, synthetic construct
  source 1..31: mol_type = other RNA
aaaaaaaaaaaaaaaaaaaaaaataaataaa

SEQ ID NO: 6141 - RNA, 31 nt, synthetic construct
  source 1..31: mol_type = other RNA
aaaaaaaaaaaataaataaataaataaataa

SEQ ID NO: 6142 - RNA, 31 nt, synthetic construct
  source 1..31: mol_type = other RNA
aaaaaaaaaaaaaaaaaaataaataaataaa

SEQ ID NO: 6143 - RNA, 31 nt, synthetic construct
  source 1..31: mol_type = other RNA
aaaaaaaataaataaataaataaataaataa

SEQ ID NO: 6144 - RNA, 31 nt, synthetic construct
  source 1..31: mol_type = other RNA
aaaaaaaaaaaaaaataaataaataaataaa

SEQ ID NO: 6145 - RNA, 31 nt, synthetic construct
  source 1..31: mol_type = other RNA
aaaataaataaataaataaataaataaataa

SEQ ID NO: 6146 - RNA, 31 nt, synthetic construct
  source 1..31: mol_type = other RNA
aaaaaaaaaaataaataaataaataaataaa

SEQ ID NO: 6147 - RNA, 31 nt, synthetic construct
  source 1..31: mol_type = other RNA
aaaaaaataaataaataaataaataaataaa

SEQ ID NO: 6148 - RNA, 31 nt, synthetic construct
  source 1..31: mol_type = other RNA
aaataaataaatataaataaataaataaata

SEQ ID NO: 6149 - RNA, 31 nt, synthetic construct
  source 1..31: mol_type = other RNA
aaataaatataaataaataaataaataaata

SEQ ID NO: 6150 - RNA, 31 nt, synthetic construct
  source 1..31: mol_type = other RNA
aaatataaataaataaataaataaataaata

SEQ ID NO: 6151 - RNA, 31 nt, synthetic construct
  source 1..31: mol_type = other RNA
aaataaataaataaataaataaatataaata

SEQ ID NO: 6152 - RNA, 31 nt, synthetic construct
  source 1..31: mol_type = other RNA
aaataaataaataaatataaataaataaata

SEQ ID NO: 6153 - RNA, 31 nt, synthetic construct
  source 1..31: mol_type = other RNA
aaataaataaataaataaatataaataaata

SEQ ID NO: 6154 - RNA, 31 nt, synthetic construct
  source 1..31: mol_type = other RNA
aaaaaaaaaaaaaaaaaaaaaaaaaaaatat

SEQ ID NO: 6155 - RNA, 31 nt, synthetic construct
  source 1..31: mol_type = other RNA
aaaaaaaaaaaaaaaaaaaaaaaataaatat

SEQ ID NO: 6156 - RNA, 31 nt, synthetic construct
  source 1..31: mol_type = other RNA
aaaaaaaaaaaaaaaaaaaataaataaatat

SEQ ID NO: 6157 - RNA, 31 nt, synthetic construct
  source 1..31: mol_type = other RNA
aaaaaaaaaaaaaaaataaataaataaatat

SEQ ID NO: 6158 - RNA, 31 nt, synthetic construct
  source 1..31: mol_type = other RNA
aaaaaaaaaaaataaataaataaataaatat

SEQ ID NO: 6159 - RNA, 31 nt, synthetic construct
  source 1..31: mol_type = other RNA
aaaaaaaataaataaataaataaataaatat

SEQ ID NO: 6160 - RNA, 31 nt, synthetic construct
  source 1..31: mol_type = other RNA
aaaataaataaataaataaataaataaatat

SEQ ID NO: 6161 - RNA, 31 nt, synthetic construct
  source 1..31: mol_type = other RNA
aaatataaataaataaataaatataaataaa

SEQ ID NO: 6162 - RNA, 31 nt, synthetic construct
  source 1..31: mol_type = other RNA
aaatataaatataaataaataaataaataaa

SEQ ID NO: 6163 - RNA, 31 nt, synthetic construct
  source 1..31: mol_type = other RNA
aaataaataaatataaatataaataaataaa

SEQ ID NO: 6164 - RNA, 31 nt, synthetic construct
  source 1..31: mol_type = other RNA
aaataaataaataaatataaataaatataaa

SEQ ID NO: 6165 - RNA, 31 nt, synthetic construct
  source 1..31: mol_type = other RNA
aaataaataaatataaataaataaatataaa

SEQ ID NO: 6166 - RNA, 31 nt, synthetic construct
  source 1..31: mol_type = other RNA
aaatataaataaataaataaataaatataaa

SEQ ID NO: 6167 - RNA, 31 nt, synthetic construct
  source 1..31: mol_type = other RNA
aaataaatataaataaatataaataaataaa

SEQ ID NO: 6168 - RNA, 31 nt, synthetic construct
  source 1..31: mol_type = other RNA
aaataaatataaataaataaatataaataaa

SEQ ID NO: 6169 - RNA, 31 nt, synthetic construct
  source 1..31: mol_type = other RNA
aaataaatataaatataaataaataaataaa

SEQ ID NO: 6170 - RNA, 31 nt, synthetic construct
  source 1..31: mol_type = other RNA
aaatataaataaatataaataaataaataaa

SEQ ID NO: 6171 - RNA, 31 nt, synthetic construct
  source 1..31: mol_type = other RNA
aaataaataaataaataaatataaatataaa

SEQ ID NO: 6172 - RNA, 31 nt, synthetic construct
  source 1..31: mol_type = other RNA
aaataaataaataaatataaatataaataaa

SEQ ID NO: 6173 - RNA, 31 nt, synthetic construct
  source 1..31: mol_type = other RNA
aaataaatataaataaataaataaatataaa

SEQ ID NO: 6174 - RNA, 31 nt, synthetic construct
  source 1..31: mol_type = other RNA
aaataaataaatataaataaatataaataaa

SEQ ID NO: 6175 - RNA, 31 nt, synthetic construct
  source 1..31: mol_type = other RNA
aaaaaaaaaaaaaaaaaaaaaaaaaaaaata

SEQ ID NO: 6176 - RNA, 31 nt, synthetic construct
  source 1..31: mol_type = other RNA
aaaaaaaaaaaaaaaaaaaaaaaaataaata

SEQ ID NO: 6177 - RNA, 31 nt, synthetic construct
  source 1..31: mol_type = other RNA
aaaaaaaaaaaaaaatataaatataaatata

SEQ ID NO: 6178 - RNA, 31 nt, synthetic construct
  source 1..31: mol_type = other RNA
aaaaaaaaaaaaaaaaaaaaataaataaata

SEQ ID NO: 6179 - RNA, 31 nt, synthetic construct
  source 1..31: mol_type = other RNA
aaaaaaaaaaataaatataaatataaatata

SEQ ID NO: 6180 - RNA, 31 nt, synthetic construct
  source 1..31: mol_type = other RNA
aaaaaaaaaaatataaataaatataaatata

SEQ ID NO: 6181 - RNA, 31 nt, synthetic construct
  source 1..31: mol_type = other RNA
aaaaaaaaaaatataaatataaataaatata

SEQ ID NO: 6182 - RNA, 31 nt, synthetic construct
  source 1..31: mol_type = other RNA
aaaaaaaaaaaaaaaaataaataaataaata

SEQ ID NO: 6183 - RNA, 31 nt, synthetic construct
  source 1..31: mol_type = other RNA
aaaaaaataaataaatataaatataaatata

SEQ ID NO: 6184 - RNA, 31 nt, synthetic construct
  source 1..31: mol_type = other RNA
aaaaaaataaatataaataaatataaatata

SEQ ID NO: 6185 - RNA, 31 nt, synthetic construct
  source 1..31: mol_type = other RNA
aaaaaaatataaataaatataaataaatata

SEQ ID NO: 6186 - RNA, 31 nt, synthetic construct
  source 1..31: mol_type = other RNA
aaaaaaataaatataaatataaataaatata

SEQ ID NO: 6187 - RNA, 31 nt, synthetic construct
  source 1..31: mol_type = other RNA
aaaaaaatataaatataaataaataaatata

SEQ ID NO: 6188 - RNA, 31 nt, synthetic construct
  source 1..31: mol_type = other RNA
aaaaaaatataaataaataaatataaatata

SEQ ID NO: 6189 - RNA, 31 nt, synthetic construct
  source 1..31: mol_type = other RNA
aaataaataaataaatatataaataaataaa

SEQ ID NO: 6190 - RNA, 31 nt, synthetic construct
  source 1..31: mol_type = other RNA
aaatatataaataaataaataaataaataaa

SEQ ID NO: 6191 - RNA, 31 nt, synthetic construct
  source 1..31: mol_type = other RNA
aaataaataaatatataaataaataaataaa

SEQ ID NO: 6192 - RNA, 31 nt, synthetic construct
  source 1..31: mol_type = other RNA
aaataaataaataaataaataaatatataaa

SEQ ID NO: 6193 - RNA, 31 nt, synthetic construct
  source 1..31: mol_type = other RNA
aaataaatatataaataaataaataaataaa

SEQ ID NO: 6194 - RNA, 31 nt, synthetic construct
  source 1..31: mol_type = other RNA
aaataaataaataaataaatatataaataaa

SEQ ID NO: 6195 - RNA, 31 nt, synthetic construct
  source 1..31: mol_type = other RNA
aaaaaaaaaaaaataaataaataaataaata

SEQ ID NO: 6196 - RNA, 31 nt, synthetic construct
  source 1..31: mol_type = other RNA
aaatataaaaaaaaaaaaaaaaaaaaatata

SEQ ID NO: 6197 - RNA, 31 nt, synthetic construct
  source 1..31: mol_type = other RNA
aaaaaaaaataaataaataaataaataaata

SEQ ID NO: 6198 - RNA, 31 nt, synthetic construct
  source 1..31: mol_type = other RNA
aaatataaataaaaaaaaaaaaaaaaatata

SEQ ID NO: 6199 - RNA, 31 nt, synthetic construct
  source 1..31: mol_type = other RNA
aaatataaaaaaaaaaaaaaaaataaatata

SEQ ID NO: 6200 - RNA, 31 nt, synthetic construct
  source 1..31: mol_type = other RNA
aaataaaaaaaaaaaaaaaaatataaatata

SEQ ID NO: 6201 - RNA, 31 nt, synthetic construct
  source 1..31: mol_type = other RNA
aaataaatataaaaaaaaaaaaaaaaatata

SEQ ID NO: 6202 - RNA, 31 nt, synthetic construct
  source 1..31: mol_type = other RNA
aaaaataaataaataaataaataaataaata

SEQ ID NO: 6203 - RNA, 31 nt, synthetic construct
  source 1..31: mol_type = other RNA
aaatataaataaaaaaaaaaaaataaatata

SEQ ID NO: 6204 - RNA, 31 nt, synthetic construct
  source 1..31: mol_type = other RNA
aaataaaaaaaaaaaaatataaataaatata

SEQ ID NO: 6205 - RNA, 31 nt, synthetic construct
  source 1..31: mol_type = other RNA
aaataaatataaaaaaaaaaaaataaatata

SEQ ID NO: 6206 - RNA, 31 nt, synthetic construct
  source 1..31: mol_type = other RNA
aaataaataaaaaaaaaaaaatataaatata

SEQ ID NO: 6207 - RNA, 31 nt, synthetic construct
  source 1..31: mol_type = other RNA
aaatataaataaataaaaaaaaaaaaatata

SEQ ID NO: 6208 - RNA, 31 nt, synthetic construct
  source 1..31: mol_type = other RNA
aaataaataaatataaaaaaaaaaaaatata

SEQ ID NO: 6209 - RNA, 31 nt, synthetic construct
  source 1..31: mol_type = other RNA
aaataaaaaaaaaaaaataaatataaatata

SEQ ID NO: 6210 - RNA, 31 nt, synthetic construct
  source 1..31: mol_type = other RNA
aaatataaaaaaaaaaaaataaataaatata

SEQ ID NO: 6211 - RNA, 31 nt, synthetic construct
  source 1..31: mol_type = other RNA
aaataaatataaataaaaaaaaaaaaatata

SEQ ID NO: 6212 - RNA, 31 nt, synthetic construct
  source 1..31: mol_type = other RNA
aaataaataaataaatataaaaaaaaatata

SEQ ID NO: 6213 - RNA, 31 nt, synthetic construct
  source 1..31: mol_type = other RNA
aaataaataaatataaataaaaaaaaatata

SEQ ID NO: 6214 - RNA, 31 nt, synthetic construct
  source 1..31: mol_type = other RNA
aaatataaataaataaataaaaaaaaatata

SEQ ID NO: 6215 - RNA, 31 nt, synthetic construct
  source 1..31: mol_type = other RNA
aaataaatataaataaataaaaaaaaatata

SEQ ID NO: 6216 - RNA, 31 nt, synthetic construct
  source 1..31: mol_type = other RNA
aaataaatataaaaaaaaataaataaatata

SEQ ID NO: 6217 - RNA, 31 nt, synthetic construct
  source 1..31: mol_type = other RNA
aaataaataaaaaaaaatataaataaatata

SEQ ID NO: 6218 - RNA, 31 nt, synthetic construct
  source 1..31: mol_type = other RNA
aaatataaataaataaaaaaaaataaatata

SEQ ID NO: 6219 - RNA, 31 nt, synthetic construct
  source 1..31: mol_type = other RNA
aaataaaaaaaaataaatataaataaatata

SEQ ID NO: 6220 - RNA, 31 nt, synthetic construct
  source 1..31: mol_type = other RNA
aaataaataaatataaaaaaaaataaatata

SEQ ID NO: 6221 - RNA, 31 nt, synthetic construct
  source 1..31: mol_type = other RNA
aaataaataaaaaaaaataaatataaatata

SEQ ID NO: 6222 - RNA, 31 nt, synthetic construct
  source 1..31: mol_type = other RNA
aaataaaaaaaaataaataaatataaatata

SEQ ID NO: 6223 - RNA, 31 nt, synthetic construct
  source 1..31: mol_type = other RNA
aaataaataaataaaaaaaaatataaatata

SEQ ID NO: 6224 - RNA, 31 nt, synthetic construct
  source 1..31: mol_type = other RNA
aaataaaaaaaaatataaataaataaatata

SEQ ID NO: 6225 - RNA, 31 nt, synthetic construct
  source 1..31: mol_type = other RNA
aaatataaataaaaaaaaataaataaatata

SEQ ID NO: 6226 - RNA, 31 nt, synthetic construct
  source 1..31: mol_type = other RNA
aaataaatataaataaaaaaaaataaatata

SEQ ID NO: 6227 - RNA, 31 nt, synthetic construct
  source 1..31: mol_type = other RNA
aaatataaaaaaaaataaataaataaatata

SEQ ID NO: 6228 - RNA, 31 nt, synthetic construct
  source 1..31: mol_type = other RNA
aaataaataaatataaataaataaaaatata

SEQ ID NO: 6229 - RNA, 31 nt, synthetic construct
  source 1..31: mol_type = other RNA
aaataaatataaataaataaataaaaatata

SEQ ID NO: 6230 - RNA, 31 nt, synthetic construct
  source 1..31: mol_type = other RNA
aaatataaataaataaataaataaaaatata

SEQ ID NO: 6231 - RNA, 31 nt, synthetic construct
  source 1..31: mol_type = other RNA
aaataaataaataaatataaaaataaatata

SEQ ID NO: 6232 - RNA, 31 nt, synthetic construct
  source 1..31: mol_type = other RNA
aaatataaaaataaataaataaataaatata

SEQ ID NO: 6233 - RNA, 31 nt, synthetic construct
  source 1..31: mol_type = other RNA
aaataaatataaaaataaataaataaatata

SEQ ID NO: 6234 - RNA, 31 nt, synthetic construct
  source 1..31: mol_type = other RNA
aaataaataaataaatataaataaaaatata

SEQ ID NO: 6235 - RNA, 31 nt, synthetic construct
  source 1..31: mol_type = other RNA
aaataaataaataaataaaaatataaatata

SEQ ID NO: 6236 - RNA, 31 nt, synthetic construct
  source 1..31: mol_type = other RNA
aaataaataaataaaaataaatataaatata

SEQ ID NO: 6237 - RNA, 31 nt, synthetic construct
  source 1..31: mol_type = other RNA
aaatataaataaaaataaataaataaatata

SEQ ID NO: 6238 - RNA, 31 nt, synthetic construct
  source 1..31: mol_type = other RNA
aaataaaaatataaataaataaataaatata

SEQ ID NO: 6239 - RNA, 31 nt, synthetic construct
  source 1..31: mol_type = other RNA
aaataaaaataaataaataaatataaatata

SEQ ID NO: 6240 - RNA, 31 nt, synthetic construct
  source 1..31: mol_type = other RNA
aaataaataaaaataaatataaataaatata

SEQ ID NO: 6241 - RNA, 31 nt, synthetic construct
  source 1..31: mol_type = other RNA
aaataaataaaaatataaataaataaatata

SEQ ID NO: 6242 - RNA, 31 nt, synthetic construct
  source 1..31: mol_type = other RNA
aaataaataaataaaaatataaataaatata

SEQ ID NO: 6243 - RNA, 31 nt, synthetic construct
  source 1..31: mol_type = other RNA
aaataaatataaataaataaaaataaatata

SEQ ID NO: 6244 - RNA, 31 nt, synthetic construct
  source 1..31: mol_type = other RNA
aaataaatataaataaaaataaataaatata

SEQ ID NO: 6245 - RNA, 31 nt, synthetic construct
  source 1..31: mol_type = other RNA
aaataaaaataaataaatataaataaatata

SEQ ID NO: 6246 - RNA, 31 nt, synthetic construct
  source 1..31: mol_type = other RNA
aaataaaaataaatataaataaataaatata

SEQ ID NO: 6247 - RNA, 31 nt, synthetic construct
  source 1..31: mol_type = other RNA
aaataaataaataaataaatataaaaatata

SEQ ID NO: 6248 - RNA, 31 nt, synthetic construct
  source 1..31: mol_type = other RNA
aaataaataaaaataaataaatataaatata

SEQ ID NO: 6249 - RNA, 31 nt, synthetic construct
  source 1..31: mol_type = other RNA
aaatataaataaataaataaaaataaatata

SEQ ID NO: 6250 - RNA, 31 nt, synthetic construct
  source 1..31: mol_type = other RNA
aaataaataaatataaaaataaataaatata

SEQ ID NO: 6251 - RNA, 31 nt, synthetic construct
  source 1..31: mol_type = other RNA
aaataaataaatataaataaaaataaatata

SEQ ID NO: 6252 - RNA, 31 nt, synthetic construct
  source 1..31: mol_type = other RNA
aaaaaaaaaaaaaaaaaaatatataaatata

SEQ ID NO: 6253 - RNA, 31 nt, synthetic construct
  source 1..31: mol_type = other RNA
aaaaaaaaaaaaaaaaaaatataaatatata

SEQ ID NO: 6254 - RNA, 31 nt, synthetic construct
  source 1..31: mol_type = other RNA
aaaaaaaaaaaaaaaaaaaaaaaaaatataa

SEQ ID NO: 6255 - RNA, 31 nt, synthetic construct
  source 1..31: mol_type = other RNA
aaaaaaaaaaaaaaatataaataaatatata

SEQ ID NO: 6256 - RNA, 31 nt, synthetic construct
  source 1..31: mol_type = other RNA
aaaaaaaaaaaaaaatatataaataaatata

SEQ ID NO: 6257 - RNA, 31 nt, synthetic construct
  source 1..31: mol_type = other RNA
aaaaaaaaaaaaaaataaatatataaatata

SEQ ID NO: 6258 - RNA, 31 nt, synthetic construct
  source 1..31: mol_type = other RNA
aaaaaaaaaaaaaaataaatataaatatata

SEQ ID NO: 6259 - RNA, 31 nt, synthetic construct
  source 1..31: mol_type = other RNA
aaaaaaaaaaaaaaaaaaaaaataaatataa

SEQ ID NO: 6260 - RNA, 31 nt, synthetic construct
  source 1..31: mol_type = other RNA
aaaaaaaaaaaaaaaaaaaaaatataaataa

SEQ ID NO: 6261 - RNA, 31 nt, synthetic construct
  source 1..31: mol_type = other RNA
aaaaaaaaaaataaatataaataaatatata

SEQ ID NO: 6262 - RNA, 31 nt, synthetic construct
  source 1..31: mol_type = other RNA
aaaaaaaaaaatataaataaataaatatata

SEQ ID NO: 6263 - RNA, 31 nt, synthetic construct
  source 1..31: mol_type = other RNA
aaaaaaaaaaataaatatataaataaatata

SEQ ID NO: 6264 - RNA, 31 nt, synthetic construct
  source 1..31: mol_type = other RNA
aaaaaaaaaaatatataaataaataaatata

SEQ ID NO: 6265 - RNA, 31 nt, synthetic construct
  source 1..31: mol_type = other RNA
aaaaaaaaaaataaataaatataaatatata

SEQ ID NO: 6266 - RNA, 31 nt, synthetic construct
  source 1..31: mol_type = other RNA
aaaaaaaaaaataaataaatatataaatata

SEQ ID NO: 6267 - RNA, 31 nt, synthetic construct
  source 1..31: mol_type = other RNA
aaaaaaaaaaaaaaaaaatataaataaataa

SEQ ID NO: 6268 - RNA, 31 nt, synthetic construct
  source 1..31: mol_type = other RNA
aaaaaaaaaaaaaaaaaataaatataaataa

SEQ ID NO: 6269 - RNA, 31 nt, synthetic construct
  source 1..31: mol_type = other RNA
aaaaaaaaaaaaaaaaaataaataaatataa

SEQ ID NO: 6270 - RNA, 32 nt, synthetic construct
  source 1..32: mol_type = other RNA
aaaaaaaaaaaaaaaaaaaaaaaaaaaatata

SEQ ID NO: 6271 - RNA, 32 nt, synthetic construct
  source 1..32: mol_type = other RNA
aaaaaaaaaaaaaaaaaaaaaaaataaatata

SEQ ID NO: 6272 - RNA, 32 nt, synthetic construct
  source 1..32: mol_type = other RNA
aaaaaaaaaaaaaaaaaaaataaataaatata

SEQ ID NO: 6273 - RNA, 32 nt, synthetic construct
  source 1..32: mol_type = other RNA
aaaaaaaaaaaaaaaataaataaataaatata

SEQ ID NO: 6274 - RNA, 32 nt, synthetic construct
  source 1..32: mol_type = other RNA
aaaaaaaaaaaataaataaataaataaatata

SEQ ID NO: 6275 - RNA, 32 nt, synthetic construct
  source 1..32: mol_type = other RNA
aaaaaaaataaataaataaataaataaatata

SEQ ID NO: 6276 - RNA, 32 nt, synthetic construct
  source 1..32: mol_type = other RNA
aaaataaataaataaataaataaataaatata

SEQ ID NO: 6277 - RNA, 32 nt, synthetic construct
  source 1..32: mol_type = other RNA
aaatataaataaataaataaataaataaataa

SEQ ID NO: 6278 - RNA, 32 nt, synthetic construct
  source 1..32: mol_type = other RNA
aaataaatataaataaataaataaataaataa

SEQ ID NO: 6279 - RNA, 32 nt, synthetic construct
  source 1..32: mol_type = other RNA
aaataaataaataaataaataaataaatataa

SEQ ID NO: 6280 - RNA, 32 nt, synthetic construct
  source 1..32: mol_type = other RNA
aaataaataaataaatataaataaataaataa

SEQ ID NO: 6281 - RNA, 32 nt, synthetic construct
  source 1..32: mol_type = other RNA
aaataaataaataaataaatataaataaataa

SEQ ID NO: 6282 - RNA, 32 nt, synthetic construct
  source 1..32: mol_type = other RNA
aaataaataaataaataaataaatataaataa

SEQ ID NO: 6283 - RNA, 32 nt, synthetic construct
  source 1..32: mol_type = other RNA
aaataaataaatataaataaataaataaataa

SEQ ID NO: 6284 - RNA, 32 nt, synthetic construct
  source 1..32: mol_type = other RNA
aaaaaaaaaaaaaaaaaaaaaatataaatata

SEQ ID NO: 6285 - RNA, 32 nt, synthetic construct
  source 1..32: mol_type = other RNA
aaaaaaaaaaaaaaaaaataaatataaatata

SEQ ID NO: 6286 - RNA, 32 nt, synthetic construct
  source 1..32: mol_type = other RNA
aaaaaaaaaaaaaaaaaatataaataaatata

SEQ ID NO: 6287 - RNA, 32 nt, synthetic construct
  source 1..32: mol_type = other RNA
aaaaaaaaaaaaaataaataaatataaatata

SEQ ID NO: 6288 - RNA, 32 nt, synthetic construct
  source 1..32: mol_type = other RNA
aaaaaaaaaaaaaataaatataaataaatata

SEQ ID NO: 6289 - RNA, 32 nt, synthetic construct
  source 1..32: mol_type = other RNA
aaaaaaaaaaaaaatataaataaataaatata

SEQ ID NO: 6290 - RNA, 32 nt, synthetic construct
  source 1..32: mol_type = other RNA
aaatataaataaataaataaataaataaatat

SEQ ID NO: 6291 - RNA, 32 nt, synthetic construct
  source 1..32: mol_type = other RNA
aaataaataaataaatataaataaataaatat

SEQ ID NO: 6292 - RNA, 32 nt, synthetic construct
  source 1..32: mol_type = other RNA
aaataaataaataaataaatataaataaatat

SEQ ID NO: 6293 - RNA, 32 nt, synthetic construct
  source 1..32: mol_type = other RNA
aaataaataaataaataaataaatataaatat

SEQ ID NO: 6294 - RNA, 32 nt, synthetic construct
  source 1..32: mol_type = other RNA
aaataaatataaataaataaataaataaatat

SEQ ID NO: 6295 - RNA, 32 nt, synthetic construct
  source 1..32: mol_type = other RNA
aaataaataaatataaataaataaataaatat

SEQ ID NO: 6296 - RNA, 32 nt, synthetic construct
  source 1..32: mol_type = other RNA
aaaaaaaaaataaataaataaatataaatata

SEQ ID NO: 6297 - RNA, 32 nt, synthetic construct
  source 1..32: mol_type = other RNA
aaaaaaaaaatataaataaataaataaatata

SEQ ID NO: 6298 - RNA, 32 nt, synthetic construct
  source 1..32: mol_type = other RNA
aaaaaaaaaataaatataaataaataaatata

SEQ ID NO: 6299 - RNA, 32 nt, synthetic construct
  source 1..32: mol_type = other RNA
aaaaaaaaaataaataaatataaataaatata

SEQ ID NO: 6300 - RNA, 32 nt, synthetic construct
  source 1..32: mol_type = other RNA
aaaaaatataaataaataaataaataaatata

SEQ ID NO: 6301 - RNA, 32 nt, synthetic construct
  source 1..32: mol_type = other RNA
aaaaaataaataaataaataaatataaatata

SEQ ID NO: 6302 - RNA, 32 nt, synthetic construct
  source 1..32: mol_type = other RNA
aaaaaataaatataaataaataaataaatata

SEQ ID NO: 6303 - RNA, 32 nt, synthetic construct
  source 1..32: mol_type = other RNA
aaaaaataaataaatataaataaataaatata

SEQ ID NO: 6304 - RNA, 32 nt, synthetic construct
  source 1..32: mol_type = other RNA
aaaaaataaataaataaatataaataaatata

SEQ ID NO: 6305 - RNA, 32 nt, synthetic construct
  source 1..32: mol_type = other RNA
aaataaaaaaaaaaaaaaaaaaaaaaaatata

SEQ ID NO: 6306 - RNA, 32 nt, synthetic construct
  source 1..32: mol_type = other RNA
aaataaataaaaaaaaaaaaaaaaaaaatata

SEQ ID NO: 6307 - RNA, 32 nt, synthetic construct
  source 1..32: mol_type = other RNA
aaataaaaaaaaaaaaaaaaaaaataaatata

SEQ ID NO: 6308 - RNA, 32 nt, synthetic construct
  source 1..32: mol_type = other RNA
aaataaataaataaaaaaaaaaaaaaaatata

SEQ ID NO: 6309 - RNA, 32 nt, synthetic construct
  source 1..32: mol_type = other RNA
aaataaaaaaaaaaaaaaaataaataaatata

SEQ ID NO: 6310 - RNA, 32 nt, synthetic construct
  source 1..32: mol_type = other RNA
aaataaataaaaaaaaaaaaaaaataaatata

SEQ ID NO: 6311 - RNA, 32 nt, synthetic construct
  source 1..32: mol_type = other RNA
aaaaaaaaaaaaaaaaaaaaaaaaaatatata

SEQ ID NO: 6312 - RNA, 32 nt, synthetic construct
  source 1..32: mol_type = other RNA
aaataaaaaaaaaaaataaataaataaatata

SEQ ID NO: 6313 - RNA, 32 nt, synthetic construct
  source 1..32: mol_type = other RNA
aaataaataaataaataaaaaaaaaaaatata

SEQ ID NO: 6314 - RNA, 32 nt, synthetic construct
  source 1..32: mol_type = other RNA
aaataaataaataaaaaaaaaaaataaatata

SEQ ID NO: 6315 - RNA, 32 nt, synthetic construct
  source 1..32: mol_type = other RNA
aaataaataaaaaaaaaaaataaataaatata

SEQ ID NO: 6316 - RNA, 32 nt, synthetic construct
  source 1..32: mol_type = other RNA
aaataaaaaaaataaataaataaataaatata

SEQ ID NO: 6317 - RNA, 32 nt, synthetic construct
  source 1..32: mol_type = other RNA
aaataaataaataaataaaaaaaataaatata

SEQ ID NO: 6318 - RNA, 32 nt, synthetic construct
  source 1..32: mol_type = other RNA
aaataaataaataaataaataaaaaaaatata

SEQ ID NO: 6319 - RNA, 32 nt, synthetic construct
  source 1..32: mol_type = other RNA
aaataaataaataaaaaaaataaataaatata

SEQ ID NO: 6320 - RNA, 32 nt, synthetic construct
  source 1..32: mol_type = other RNA
aaataaataaaaaaaataaataaataaatata

SEQ ID NO: 6321 - RNA, 32 nt, synthetic construct
  source 1..32: mol_type = other RNA
aaaaaaaaaaaaaaaaaaaaaataaatatata

SEQ ID NO: 6322 - RNA, 32 nt, synthetic construct
  source 1..32: mol_type = other RNA
aaaaaaaaaaaaaaaaaaaaaaaaaaaaataa

SEQ ID NO: 6323 - RNA, 32 nt, synthetic construct
  source 1..32: mol_type = other RNA
aaaaaaaaaaaaaaaaaataaataaatatata

SEQ ID NO: 6324 - RNA, 32 nt, synthetic construct
  source 1..32: mol_type = other RNA
aaataaataaataaataaataaaataaatata

SEQ ID NO: 6325 - RNA, 32 nt, synthetic construct
  source 1..32: mol_type = other RNA
aaataaaataaataaataaataaataaatata

SEQ ID NO: 6326 - RNA, 32 nt, synthetic construct
  source 1..32: mol_type = other RNA
aaataaataaataaataaataaataaaatata

SEQ ID NO: 6327 - RNA, 32 nt, synthetic construct
  source 1..32: mol_type = other RNA
aaataaataaaataaataaataaataaatata

SEQ ID NO: 6328 - RNA, 32 nt, synthetic construct
  source 1..32: mol_type = other RNA
aaataaataaataaataaaataaataaatata

SEQ ID NO: 6329 - RNA, 32 nt, synthetic construct
  source 1..32: mol_type = other RNA
aaaaaaaaaaaaaaaaaaaaaaaaataaataa

SEQ ID NO: 6330 - RNA, 32 nt, synthetic construct
  source 1..32: mol_type = other RNA
aaaaaaaaaaaaaataaataaataaatatata

SEQ ID NO: 6331 - RNA, 32 nt, synthetic construct
  source 1..32: mol_type = other RNA
aaataaataaataaataaataaataaatatat

SEQ ID NO: 6332 - RNA, 32 nt, synthetic construct
  source 1..32: mol_type = other RNA
aaaaaaaaaaaaaaaaaaaaataaataaataa

SEQ ID NO: 6333 - RNA, 32 nt, synthetic construct
  source 1..32: mol_type = other RNA
aaaaaaaaaataaataaataaataaatatata

SEQ ID NO: 6334 - RNA, 32 nt, synthetic construct
  source 1..32: mol_type = other RNA
aaaaaaaaaaaaaaaaaaaaaaaaaaaataaa

SEQ ID NO: 6335 - RNA, 32 nt, synthetic construct
  source 1..32: mol_type = other RNA
aaaaaaaaaaaaaaaaataaataaataaataa

SEQ ID NO: 6336 - RNA, 32 nt, synthetic construct
  source 1..32: mol_type = other RNA
aaaaaataaataaataaataaataaatatata

SEQ ID NO: 6337 - RNA, 32 nt, synthetic construct
  source 1..32: mol_type = other RNA
aaaaaaaaaaaaaaaaaaaaaaaataaataaa

SEQ ID NO: 6338 - RNA, 32 nt, synthetic construct
  source 1..32: mol_type = other RNA
aaaaaaaaaaaaataaataaataaataaataa

SEQ ID NO: 6339 - RNA, 32 nt, synthetic construct
  source 1..32: mol_type = other RNA
aaaaaaaaaaaaaaaaaaaataaataaataaa

SEQ ID NO: 6340 - RNA, 32 nt, synthetic construct
  source 1..32: mol_type = other RNA
aaaaaaaaataaataaataaataaataaataa

SEQ ID NO: 6341 - RNA, 32 nt, synthetic construct
  source 1..32: mol_type = other RNA
aaaaaaaaaaaaaaaataaataaataaataaa

SEQ ID NO: 6342 - RNA, 32 nt, synthetic construct
  source 1..32: mol_type = other RNA
aaaaataaataaataaataaataaataaataa

SEQ ID NO: 6343 - RNA, 32 nt, synthetic construct
  source 1..32: mol_type = other RNA
aaaaaaaaaaaataaataaataaataaataaa

SEQ ID NO: 6344 - RNA, 32 nt, synthetic construct
  source 1..32: mol_type = other RNA
aaaaaaaataaataaataaataaataaataaa

SEQ ID NO: 6345 - RNA, 32 nt, synthetic construct
  source 1..32: mol_type = other RNA
aaaataaataaataaataaataaataaataaa

SEQ ID NO: 6346 - RNA, 32 nt, synthetic construct
  source 1..32: mol_type = other RNA
aaaaaaaaaaaaaaaaaaaaaaaaaaaaatat

SEQ ID NO: 6347 - RNA, 32 nt, synthetic construct
  source 1..32: mol_type = other RNA
aaaaaaaaaaaaaaaaaaaaaaaaataaatat

SEQ ID NO: 6348 - RNA, 32 nt, synthetic construct
  source 1..32: mol_type = other RNA
aaaaaaaaaaaaaaaaaaaaataaataaatat

SEQ ID NO: 6349 - RNA, 32 nt, synthetic construct
  source 1..32: mol_type = other RNA
aaaaaaaaaaaaaaaaataaataaataaatat

SEQ ID NO: 6350 - RNA, 32 nt, synthetic construct
  source 1..32: mol_type = other RNA
taaataaataaataaataaataaataaatata

SEQ ID NO: 6351 - RNA, 32 nt, synthetic construct
  source 1..32: mol_type = other RNA
aaaaaaaaaaaaataaataaataaataaatat

SEQ ID NO: 6352 - RNA, 32 nt, synthetic construct
  source 1..32: mol_type = other RNA
aaaaaaaaataaataaataaataaataaatat

SEQ ID NO: 6353 - RNA, 32 nt, synthetic construct
  source 1..32: mol_type = other RNA
aaaaataaataaataaataaataaataaatat

SEQ ID NO: 6354 - RNA, 32 nt, synthetic construct
  source 1..32: mol_type = other RNA
aataaatataaataaataaataaataaatata

SEQ ID NO: 6355 - RNA, 32 nt, synthetic construct
  source 1..32: mol_type = other RNA
aataaataaatataaataaataaataaatata

SEQ ID NO: 6356 - RNA, 32 nt, synthetic construct
  source 1..32: mol_type = other RNA
aataaataaataaataaatataaataaatata

SEQ ID NO: 6357 - RNA, 32 nt, synthetic construct
  source 1..32: mol_type = other RNA
aataaataaataaataaataaatataaatata

SEQ ID NO: 6358 - RNA, 32 nt, synthetic construct
  source 1..32: mol_type = other RNA
aatataaataaataaataaataaataaatata

SEQ ID NO: 6359 - RNA, 32 nt, synthetic construct
  source 1..32: mol_type = other RNA
aataaataaataaatataaataaataaatata

SEQ ID NO: 6360 - RNA, 32 nt, synthetic construct
  source 1..32: mol_type = other RNA
aaaaaaaaaaaaaaaaaaaaaaaaaaaaaata

SEQ ID NO: 6361 - RNA, 32 nt, synthetic construct
  source 1..32: mol_type = other RNA
aaaaaaaaaaaaaaaaaaaaaaaaaataaata

SEQ ID NO: 6362 - RNA, 32 nt, synthetic construct
  source 1..32: mol_type = other RNA
aaaaaaaaaaaaaaaatataaatataaatata

SEQ ID NO: 6363 - RNA, 32 nt, synthetic construct
  source 1..32: mol_type = other RNA
aaaaaaaaaaaaaaaaaaaaaataaataaata

SEQ ID NO: 6364 - RNA, 32 nt, synthetic construct
  source 1..32: mol_type = other RNA
aaaaaaaaaaaataaatataaatataaatata

SEQ ID NO: 6365 - RNA, 32 nt, synthetic construct
  source 1..32: mol_type = other RNA
aaaaaaaaaaaatataaataaatataaatata

SEQ ID NO: 6366 - RNA, 32 nt, synthetic construct
  source 1..32: mol_type = other RNA
aaaaaaaaaaaatataaatataaataaatata

SEQ ID NO: 6367 - RNA, 32 nt, synthetic construct
  source 1..32: mol_type = other RNA
aaaaaaaaaaaaaaaaaataaataaataaata

SEQ ID NO: 6368 - RNA, 32 nt, synthetic construct
  source 1..32: mol_type = other RNA
aaaaaaaataaataaatataaatataaatata

SEQ ID NO: 6369 - RNA, 32 nt, synthetic construct
  source 1..32: mol_type = other RNA
aaaaaaaatataaataaataaatataaatata

SEQ ID NO: 6370 - RNA, 32 nt, synthetic construct
  source 1..32: mol_type = other RNA
aaaaaaaataaatataaataaatataaatata

SEQ ID NO: 6371 - RNA, 32 nt, synthetic construct
  source 1..32: mol_type = other RNA
aaaaaaaataaatataaatataaataaatata

SEQ ID NO: 6372 - RNA, 32 nt, synthetic construct
  source 1..32: mol_type = other RNA
aaaaaaaatataaataaatataaataaatata

SEQ ID NO: 6373 - RNA, 32 nt, synthetic construct
  source 1..32: mol_type = other RNA
aaaaaaaatataaatataaataaataaatata

SEQ ID NO: 6374 - RNA, 32 nt, synthetic construct
  source 1..32: mol_type = other RNA
aaaaaaaaaaaaaataaataaataaataaata

SEQ ID NO: 6375 - RNA, 32 nt, synthetic construct
  source 1..32: mol_type = other RNA
aaaatataaatataaataaataaataaatata

SEQ ID NO: 6376 - RNA, 32 nt, synthetic construct
  source 1..32: mol_type = other RNA
aaaatataaataaataaatataaataaatata

SEQ ID NO: 6377 - RNA, 32 nt, synthetic construct
  source 1..32: mol_type = other RNA
aaaataaatataaataaatataaataaatata

SEQ ID NO: 6378 - RNA, 32 nt, synthetic construct
  source 1..32: mol_type = other RNA
aaaataaataaatataaataaatataaatata

SEQ ID NO: 6379 - RNA, 32 nt, synthetic construct
  source 1..32: mol_type = other RNA
aaaataaatataaataaataaatataaatata

SEQ ID NO: 6380 - RNA, 32 nt, synthetic construct
  source 1..32: mol_type = other RNA
aaaataaataaatataaatataaataaatata

SEQ ID NO: 6381 - RNA, 32 nt, synthetic construct
  source 1..32: mol_type = other RNA
aaaatataaataaataaataaatataaatata

SEQ ID NO: 6382 - RNA, 32 nt, synthetic construct
  source 1..32: mol_type = other RNA
aaaataaataaataaatataaatataaatata

SEQ ID NO: 6383 - RNA, 32 nt, synthetic construct
  source 1..32: mol_type = other RNA
aaaatataaataaatataaataaataaatata

SEQ ID NO: 6384 - RNA, 32 nt, synthetic construct
  source 1..32: mol_type = other RNA
aaaataaatataaatataaataaataaatata

SEQ ID NO: 6385 - RNA, 32 nt, synthetic construct
  source 1..32: mol_type = other RNA
aaatataaaaaaaaaaaaaaaaaaaaaatata

SEQ ID NO: 6386 - RNA, 32 nt, synthetic construct
  source 1..32: mol_type = other RNA
aaaaaaaaaataaataaataaataaataaata

SEQ ID NO: 6387 - RNA, 32 nt, synthetic construct
  source 1..32: mol_type = other RNA
aaataaatataaaaaaaaaaaaaaaaaatata

SEQ ID NO: 6388 - RNA, 32 nt, synthetic construct
  source 1..32: mol_type = other RNA
aaatataaataaaaaaaaaaaaaaaaaatata

SEQ ID NO: 6389 - RNA, 32 nt, synthetic construct
  source 1..32: mol_type = other RNA
aaataaaaaaaaaaaaaaaaaatataaatata

SEQ ID NO: 6390 - RNA, 32 nt, synthetic construct
  source 1..32: mol_type = other RNA
aaatataaaaaaaaaaaaaaaaaataaatata

SEQ ID NO: 6391 - RNA, 32 nt, synthetic construct
  source 1..32: mol_type = other RNA
aaaaaataaataaataaataaataaataaata

SEQ ID NO: 6392 - RNA, 32 nt, synthetic construct
  source 1..32: mol_type = other RNA
aaatataaaaaaaaaaaaaataaataaatata

SEQ ID NO: 6393 - RNA, 32 nt, synthetic construct
  source 1..32: mol_type = other RNA
aaataaaaaaaaaaaaaatataaataaatata

SEQ ID NO: 6394 - RNA, 32 nt, synthetic construct
  source 1..32: mol_type = other RNA
aaataaatataaataaaaaaaaaaaaaatata

SEQ ID NO: 6395 - RNA, 32 nt, synthetic construct
  source 1..32: mol_type = other RNA
aaataaataaatataaaaaaaaaaaaaatata

SEQ ID NO: 6396 - RNA, 32 nt, synthetic construct
  source 1..32: mol_type = other RNA
aaatataaataaataaaaaaaaaaaaaatata

SEQ ID NO: 6397 - RNA, 32 nt, synthetic construct
  source 1..32: mol_type = other RNA
aaataaataaaaaaaaaaaaaatataaatata

SEQ ID NO: 6398 - RNA, 32 nt, synthetic construct
  source 1..32: mol_type = other RNA
aaataaatataaaaaaaaaaaaaataaatata

SEQ ID NO: 6399 - RNA, 32 nt, synthetic construct
  source 1..32: mol_type = other RNA
aaataaaaaaaaaaaaaataaatataaatata

SEQ ID NO: 6400 - RNA, 32 nt, synthetic construct
  source 1..32: mol_type = other RNA
aaatataaataaaaaaaaaaaaaataaatata

SEQ ID NO: 6401 - RNA, 32 nt, synthetic construct
  source 1..32: mol_type = other RNA
aaataaaaaaaaaatataaataaataaatata

SEQ ID NO: 6402 - RNA, 32 nt, synthetic construct
  source 1..32: mol_type = other RNA
aaataaataaataaatataaaaaaaaaatata

SEQ ID NO: 6403 - RNA, 32 nt, synthetic construct
  source 1..32: mol_type = other RNA
aaataaaaaaaaaataaatataaataaatata

SEQ ID NO: 6404 - RNA, 32 nt, synthetic construct
  source 1..32: mol_type = other RNA
aaataaaaaaaaaataaataaatataaatata

SEQ ID NO: 6405 - RNA, 32 nt, synthetic construct
  source 1..32: mol_type = other RNA
aaataaatataaataaataaaaaaaaaatata

SEQ ID NO: 6406 - RNA, 32 nt, synthetic construct
  source 1..32: mol_type = other RNA
aaataaataaatataaataaaaaaaaaatata

SEQ ID NO: 6407 - RNA, 32 nt, synthetic construct
  source 1..32: mol_type = other RNA
aaatataaataaataaataaaaaaaaaatata

SEQ ID NO: 6408 - RNA, 32 nt, synthetic construct
  source 1..32: mol_type = other RNA
aaatataaataaataaaaaaaaaataaatata

SEQ ID NO: 6409 - RNA, 32 nt, synthetic construct
  source 1..32: mol_type = other RNA
aaataaataaataaaaaaaaaatataaatata

SEQ ID NO: 6410 - RNA, 32 nt, synthetic construct
  source 1..32: mol_type = other RNA
aaatataaataaaaaaaaaataaataaatata

SEQ ID NO: 6411 - RNA, 32 nt, synthetic construct
  source 1..32: mol_type = other RNA
aaataaatataaaaaaaaaataaataaatata

SEQ ID NO: 6412 - RNA, 32 nt, synthetic construct
  source 1..32: mol_type = other RNA
aaataaataaaaaaaaaataaatataaatata

SEQ ID NO: 6413 - RNA, 32 nt, synthetic construct
  source 1..32: mol_type = other RNA
aaataaataaaaaaaaaatataaataaatata

SEQ ID NO: 6414 - RNA, 32 nt, synthetic construct
  source 1..32: mol_type = other RNA
aaataaatataaataaaaaaaaaataaatata

SEQ ID NO: 6415 - RNA, 32 nt, synthetic construct
  source 1..32: mol_type = other RNA
aaatataaaaaaaaaataaataaataaatata

SEQ ID NO: 6416 - RNA, 32 nt, synthetic construct
  source 1..32: mol_type = other RNA
aaataaataaatataaaaaaaaaataaatata

SEQ ID NO: 6417 - RNA, 32 nt, synthetic construct
  source 1..32: mol_type = other RNA
aataaataaataaataaataaataaatatata

SEQ ID NO: 6418 - RNA, 32 nt, synthetic construct
  source 1..32: mol_type = other RNA
aaataaaaaatataaataaataaataaatata

SEQ ID NO: 6419 - RNA, 32 nt, synthetic construct
  source 1..32: mol_type = other RNA
aaataaaaaataaatataaataaataaatata

SEQ ID NO: 6420 - RNA, 32 nt, synthetic construct
  source 1..32: mol_type = other RNA
aaataaataaataaatataaataaaaaatata

SEQ ID NO: 6421 - RNA, 32 nt, synthetic construct
  source 1..32: mol_type = other RNA
aaataaataaataaatataaaaaataaatata

SEQ ID NO: 6422 - RNA, 32 nt, synthetic construct
  source 1..32: mol_type = other RNA
aaataaataaataaaaaatataaataaatata

SEQ ID NO: 6423 - RNA, 32 nt, synthetic construct
  source 1..32: mol_type = other RNA
aaataaaaaataaataaatataaataaatata

SEQ ID NO: 6424 - RNA, 32 nt, synthetic construct
  source 1..32: mol_type = other RNA
aaataaaaaataaataaataaatataaatata

SEQ ID NO: 6425 - RNA, 32 nt, synthetic construct
  source 1..32: mol_type = other RNA
aaatataaataaataaataaataaaaaatata

SEQ ID NO: 6426 - RNA, 32 nt, synthetic construct
  source 1..32: mol_type = other RNA
aaataaataaataaataaaaaatataaatata

SEQ ID NO: 6427 - RNA, 32 nt, synthetic construct
  source 1..32: mol_type = other RNA
aaataaataaatataaataaataaaaaatata

SEQ ID NO: 6428 - RNA, 32 nt, synthetic construct
  source 1..32: mol_type = other RNA
aaataaataaataaataaatataaaaaatata

SEQ ID NO: 6429 - RNA, 32 nt, synthetic construct
  source 1..32: mol_type = other RNA
aaataaatataaataaataaataaaaaatata

SEQ ID NO: 6430 - RNA, 32 nt, synthetic construct
  source 1..32: mol_type = other RNA
aaataaataaataaaaaataaatataaatata

SEQ ID NO: 6431 - RNA, 32 nt, synthetic construct
  source 1..32: mol_type = other RNA
aaatataaataaataaaaaataaataaatata

SEQ ID NO: 6432 - RNA, 32 nt, synthetic construct
  source 1..32: mol_type = other RNA
aaataaatataaataaaaaataaataaatata

SEQ ID NO: 6433 - RNA, 32 nt, synthetic construct
  source 1..32: mol_type = other RNA
aaataaataaatataaaaaataaataaatata

SEQ ID NO: 6434 - RNA, 32 nt, synthetic construct
  source 1..32: mol_type = other RNA
aaataaataaaaaatataaataaataaatata

SEQ ID NO: 6435 - RNA, 32 nt, synthetic construct
  source 1..32: mol_type = other RNA
aaataaataaaaaataaataaatataaatata

SEQ ID NO: 6436 - RNA, 32 nt, synthetic construct
  source 1..32: mol_type = other RNA
aaatataaataaataaataaaaaataaatata

SEQ ID NO: 6437 - RNA, 32 nt, synthetic construct
  source 1..32: mol_type = other RNA
aaataaatataaataaataaaaaataaatata

SEQ ID NO: 6438 - RNA, 32 nt, synthetic construct
  source 1..32: mol_type = other RNA
aaatataaataaaaaataaataaataaatata

SEQ ID NO: 6439 - RNA, 32 nt, synthetic construct
  source 1..32: mol_type = other RNA
aaataaataaatataaataaaaaataaatata

SEQ ID NO: 6440 - RNA, 32 nt, synthetic construct
  source 1..32: mol_type = other RNA
aaatataaaaaataaataaataaataaatata

SEQ ID NO: 6441 - RNA, 32 nt, synthetic construct
  source 1..32: mol_type = other RNA
aaaaaaaaaaaaaaaaaaaatataaatatata

SEQ ID NO: 6442 - RNA, 32 nt, synthetic construct
  source 1..32: mol_type = other RNA
aaaaaaaaaaaaaaaaaaaatatataaatata

SEQ ID NO: 6443 - RNA, 32 nt, synthetic construct
  source 1..32: mol_type = other RNA
aaaaaaaaaaaaaaaaaaaaaaaaaaatataa

SEQ ID NO: 6444 - RNA, 32 nt, synthetic construct
  source 1..32: mol_type = other RNA
aaaaaaaaaaaaaaaataaatatataaatata

SEQ ID NO: 6445 - RNA, 32 nt, synthetic construct
  source 1..32: mol_type = other RNA
aaaaaaaaaaaaaaaatatataaataaatata

SEQ ID NO: 6446 - RNA, 32 nt, synthetic construct
  source 1..32: mol_type = other RNA
aaaaaaaaaaaaaaaatataaataaatatata

SEQ ID NO: 6447 - RNA, 32 nt, synthetic construct
  source 1..32: mol_type = other RNA
aaaaaaaaaaaaaaaataaatataaatatata

SEQ ID NO: 6448 - RNA, 32 nt, synthetic construct
  source 1..32: mol_type = other RNA
aaaaaaaaaaaaaaaaaaaaaaataaatataa

SEQ ID NO: 6449 - RNA, 32 nt, synthetic construct
  source 1..32: mol_type = other RNA
aaaaaaaaaaaaaaaaaaaaaaatataaataa

SEQ ID NO: 6450 - RNA, 32 nt, synthetic construct
  source 1..32: mol_type = other RNA
aaaaaaaaaaaataaataaatatataaatata

SEQ ID NO: 6451 - RNA, 32 nt, synthetic construct
  source 1..32: mol_type = other RNA
aaaaaaaaaaaataaatatataaataaatata

SEQ ID NO: 6452 - RNA, 32 nt, synthetic construct
  source 1..32: mol_type = other RNA
aaaaaaaaaaaataaatataaataaatatata

SEQ ID NO: 6453 - RNA, 32 nt, synthetic construct
  source 1..32: mol_type = other RNA
aaaaaaaaaaaatataaataaataaatatata

SEQ ID NO: 6454 - RNA, 32 nt, synthetic construct
  source 1..32: mol_type = other RNA
aaaaaaaaaaaataaataaatataaatatata

SEQ ID NO: 6455 - RNA, 32 nt, synthetic construct
  source 1..32: mol_type = other RNA
aaaaaaaaaaaatatataaataaataaatata

SEQ ID NO: 6456 - RNA, 32 nt, synthetic construct
  source 1..32: mol_type = other RNA
aaaaaaaaaaaaaaaaaaataaatataaataa

SEQ ID NO: 6457 - RNA, 32 nt, synthetic construct
  source 1..32: mol_type = other RNA
aaaaaaaaaaaaaaaaaaataaataaatataa

SEQ ID NO: 6458 - RNA, 32 nt, synthetic construct
  source 1..32: mol_type = other RNA
aaaaaaaaaaaaaaaaaaatataaataaataa

SEQ ID NO: 6459 - RNA, 32 nt, synthetic construct
  source 1..32: mol_type = other RNA
aaaaaaaataaataaatatataaataaatata

SEQ ID NO: 6460 - RNA, 32 nt, synthetic construct
  source 1..32: mol_type = other RNA
aaaaaaaataaataaataaatatataaatata

SEQ ID NO: 6461 - RNA, 32 nt, synthetic construct
  source 1..32: mol_type = other RNA
aaaaaaaataaataaataaatataaatatata

SEQ ID NO: 6462 - RNA, 32 nt, synthetic construct
  source 1..32: mol_type = other RNA
aaaaaaaatatataaataaataaataaatata

SEQ ID NO: 6463 - RNA, 32 nt, synthetic construct
  source 1..32: mol_type = other RNA
aaaaaaaatataaataaataaataaatatata

SEQ ID NO: 6464 - RNA, 32 nt, synthetic construct
  source 1..32: mol_type = other RNA
aaaaaaaataaatataaataaataaatatata

SEQ ID NO: 6465 - RNA, 32 nt, synthetic construct
  source 1..32: mol_type = other RNA
aaaaaaaataaataaatataaataaatatata

SEQ ID NO: 6466 - RNA, 32 nt, synthetic construct
  source 1..32: mol_type = other RNA
aaaaaaaataaatatataaataaataaatata

SEQ ID NO: 6467 - RNA, 32 nt, synthetic construct
  source 1..32: mol_type = other RNA
aaaaaaaaaaaaaaaaaaaaaaaaaatataaa

SEQ ID NO: 6468 - RNA, 32 nt, synthetic construct
  source 1..32: mol_type = other RNA
aaaaaaaaaaaaaaataaataaatataaataa

SEQ ID NO: 6469 - RNA, 32 nt, synthetic construct
  source 1..32: mol_type = other RNA
aaaaaaaaaaaaaaataaataaataaatataa

SEQ ID NO: 6470 - RNA, 32 nt, synthetic construct
  source 1..32: mol_type = other RNA
aaaaaaaaaaaaaaataaatataaataaataa

SEQ ID NO: 6471 - RNA, 32 nt, synthetic construct
  source 1..32: mol_type = other RNA
aaaaaaaaaaaaaaatataaataaataaataa

SEQ ID NO: 6472 - RNA, 33 nt, synthetic construct
  source 1..33: mol_type = other RNA
aaataaataaatataaataaataaataaatata

SEQ ID NO: 6473 - RNA, 33 nt, synthetic construct
  source 1..33: mol_type = other RNA
aaataaataaataaatataaataaataaatata

SEQ ID NO: 6474 - RNA, 33 nt, synthetic construct
  source 1..33: mol_type = other RNA
aaataaatataaataaataaataaataaatata

SEQ ID NO: 6475 - RNA, 33 nt, synthetic construct
  source 1..33: mol_type = other RNA
aaataaataaataaataaataaatataaatata

SEQ ID NO: 6476 - RNA, 33 nt, synthetic construct
  source 1..33: mol_type = other RNA
aaatataaataaataaataaataaataaatata

SEQ ID NO: 6477 - RNA, 33 nt, synthetic construct
  source 1..33: mol_type = other RNA
aaataaataaataaataaatataaataaatata

SEQ ID NO: 6478 - RNA, 33 nt, synthetic construct
  source 1..33: mol_type = other RNA
aaataaataaataaataaataaataaatatata

SEQ ID NO: 6479 - RNA, 33 nt, synthetic construct
  source 1..33: mol_type = other RNA
aaaaaaaaaaaaaaaaaaaaaaaaaaaaatata

SEQ ID NO: 6480 - RNA, 33 nt, synthetic construct
  source 1..33: mol_type = other RNA
aaaaaaaaaaaaaaaaaaaaaaaaataaatata

SEQ ID NO: 6481 - RNA, 33 nt, synthetic construct
  source 1..33: mol_type = other RNA
aaaaaaaaaaaaaaaaaaaaataaataaatata

SEQ ID NO: 6482 - RNA, 33 nt, synthetic construct
  source 1..33: mol_type = other RNA
aaaaaaaaaaaaaaaaataaataaataaatata

SEQ ID NO: 6483 - RNA, 33 nt, synthetic construct
  source 1..33: mol_type = other RNA
aaaaaaaaaaaaataaataaataaataaatata

SEQ ID NO: 6484 - RNA, 33 nt, synthetic construct
  source 1..33: mol_type = other RNA
aaaaaaaaataaataaataaataaataaatata

SEQ ID NO: 6485 - RNA, 33 nt, synthetic construct
  source 1..33: mol_type = other RNA
aaaaataaataaataaataaataaataaatata

SEQ ID NO: 6486 - RNA, 33 nt, synthetic construct
  source 1..33: mol_type = other RNA
aaataaataaataaataaataaataaataaata

SEQ ID NO: 6487 - RNA, 33 nt, synthetic construct
  source 1..33: mol_type = other RNA
aaataaatataaataaataaataaataaataaa

SEQ ID NO: 6488 - RNA, 33 nt, synthetic construct
  source 1..33: mol_type = other RNA
aaataaataaatataaataaataaataaataaa

SEQ ID NO: 6489 - RNA, 33 nt, synthetic construct
  source 1..33: mol_type = other RNA
aaataaataaataaatataaataaataaataaa

SEQ ID NO: 6490 - RNA, 33 nt, synthetic construct
  source 1..33: mol_type = other RNA
aaataaataaataaataaataaatataaataaa

SEQ ID NO: 6491 - RNA, 33 nt, synthetic construct
  source 1..33: mol_type = other RNA
aaataaataaataaataaataaataaatataaa

SEQ ID NO: 6492 - RNA, 33 nt, synthetic construct
  source 1..33: mol_type = other RNA
aaatataaataaataaataaataaataaataaa

SEQ ID NO: 6493 - RNA, 33 nt, synthetic construct
  source 1..33: mol_type = other RNA
aaataaataaataaataaatataaataaataaa

SEQ ID NO: 6494 - RNA, 33 nt, synthetic construct
  source 1..33: mol_type = other RNA
aaaaaaaaaaaaaaaaaaaaaaatataaatata

SEQ ID NO: 6495 - RNA, 33 nt, synthetic construct
  source 1..33: mol_type = other RNA
aaaaaaaaaaaaaaaaaaataaatataaatata

SEQ ID NO: 6496 - RNA, 33 nt, synthetic construct
  source 1..33: mol_type = other RNA
aaaaaaaaaaaaaaaaaaatataaataaatata

SEQ ID NO: 6497 - RNA, 33 nt, synthetic construct
  source 1..33: mol_type = other RNA
aaaaaaaaaaaaaaataaataaatataaatata

SEQ ID NO: 6498 - RNA, 33 nt, synthetic construct
  source 1..33: mol_type = other RNA
aaaaaaaaaaaaaaataaatataaataaatata

SEQ ID NO: 6499 - RNA, 33 nt, synthetic construct
  source 1..33: mol_type = other RNA
aaaaaaaaaaaaaaatataaataaataaatata

SEQ ID NO: 6500 - RNA, 33 nt, synthetic construct
  source 1..33: mol_type = other RNA
aaaaaaaaaaataaataaataaatataaatata

SEQ ID NO: 6501 - RNA, 33 nt, synthetic construct
  source 1..33: mol_type = other RNA
aaaaaaaaaaataaatataaataaataaatata

SEQ ID NO: 6502 - RNA, 33 nt, synthetic construct
  source 1..33: mol_type = other RNA
aaaaaaaaaaatataaataaataaataaatata

SEQ ID NO: 6503 - RNA, 33 nt, synthetic construct
  source 1..33: mol_type = other RNA
aaaaaaaaaaataaataaatataaataaatata

SEQ ID NO: 6504 - RNA, 33 nt, synthetic construct
  source 1..33: mol_type = other RNA
aaaaaaataaataaatataaataaataaatata

SEQ ID NO: 6505 - RNA, 33 nt, synthetic construct
  source 1..33: mol_type = other RNA
aaaaaaatataaataaataaataaataaatata

SEQ ID NO: 6506 - RNA, 33 nt, synthetic construct
  source 1..33: mol_type = other RNA
aaaaaaataaatataaataaataaataaatata

SEQ ID NO: 6507 - RNA, 33 nt, synthetic construct
  source 1..33: mol_type = other RNA
aaaaaaataaataaataaataaatataaatata

SEQ ID NO: 6508 - RNA, 33 nt, synthetic construct
  source 1..33: mol_type = other RNA
aaaaaaataaataaataaatataaataaatata

SEQ ID NO: 6509 - RNA, 33 nt, synthetic construct
  source 1..33: mol_type = other RNA
aaataaaaaaaaaaaaaaaaaaaaaaaaatata

SEQ ID NO: 6510 - RNA, 33 nt, synthetic construct
  source 1..33: mol_type = other RNA
aaataaataaaaaaaaaaaaaaaaaaaaatata

SEQ ID NO: 6511 - RNA, 33 nt, synthetic construct
  source 1..33: mol_type = other RNA
aaataaaaaaaaaaaaaaaaaaaaataaatata

SEQ ID NO: 6512 - RNA, 33 nt, synthetic construct
  source 1..33: mol_type = other RNA
aaataaataaataaaaaaaaaaaaaaaaatata

SEQ ID NO: 6513 - RNA, 33 nt, synthetic construct
  source 1..33: mol_type = other RNA
aaataaataaaaaaaaaaaaaaaaataaatata

SEQ ID NO: 6514 - RNA, 33 nt, synthetic construct
  source 1..33: mol_type = other RNA
aaataaaaaaaaaaaaaaaaataaataaatata

SEQ ID NO: 6515 - RNA, 33 nt, synthetic construct
  source 1..33: mol_type = other RNA
aaataaataaataaataaaaaaaaaaaaatata

SEQ ID NO: 6516 - RNA, 33 nt, synthetic construct
  source 1..33: mol_type = other RNA
aaataaataaataaaaaaaaaaaaataaatata

SEQ ID NO: 6517 - RNA, 33 nt, synthetic construct
  source 1..33: mol_type = other RNA
aaataaataaaaaaaaaaaaataaataaatata

SEQ ID NO: 6518 - RNA, 33 nt, synthetic construct
  source 1..33: mol_type = other RNA
aaataaaaaaaaaaaaataaataaataaatata

SEQ ID NO: 6519 - RNA, 33 nt, synthetic construct
  source 1..33: mol_type = other RNA
aaaaaaaaaaaaaaaaaaaaaaaaaaatatata

SEQ ID NO: 6520 - RNA, 33 nt, synthetic construct
  source 1..33: mol_type = other RNA
aaaaaaaaaaaaaaaaaaaaaaataaatatata

SEQ ID NO: 6521 - RNA, 33 nt, synthetic construct
  source 1..33: mol_type = other RNA
aaataaataaataaataaaaaaaaataaatata

SEQ ID NO: 6522 - RNA, 33 nt, synthetic construct
  source 1..33: mol_type = other RNA
aaataaataaataaaaaaaaataaataaatata

SEQ ID NO: 6523 - RNA, 33 nt, synthetic construct
  source 1..33: mol_type = other RNA
aaataaaaaaaaataaataaataaataaatata

SEQ ID NO: 6524 - RNA, 33 nt, synthetic construct
  source 1..33: mol_type = other RNA
aaataaataaaaaaaaataaataaataaatata

SEQ ID NO: 6525 - RNA, 33 nt, synthetic construct
  source 1..33: mol_type = other RNA
aaataaataaataaataaataaaaaaaaatata

SEQ ID NO: 6526 - RNA, 33 nt, synthetic construct
  source 1..33: mol_type = other RNA
aaaaaaaaaaaaaaaaaaaaaaaaaaaaaataa

SEQ ID NO: 6527 - RNA, 33 nt, synthetic construct
  source 1..33: mol_type = other RNA
aaataaataaataaaaataaataaataaatata

SEQ ID NO: 6528 - RNA, 33 nt, synthetic construct
  source 1..33: mol_type = other RNA
aaataaaaataaataaataaataaataaatata

SEQ ID NO: 6529 - RNA, 33 nt, synthetic construct
  source 1..33: mol_type = other RNA
aaataaataaaaataaataaataaataaatata

SEQ ID NO: 6530 - RNA, 33 nt, synthetic construct
  source 1..33: mol_type = other RNA
aaataaataaataaataaataaaaataaatata

SEQ ID NO: 6531 - RNA, 33 nt, synthetic construct
  source 1..33: mol_type = other RNA
aaataaataaataaataaataaataaaaatata

SEQ ID NO: 6532 - RNA, 33 nt, synthetic construct
  source 1..33: mol_type = other RNA
aaataaataaataaataaaaataaataaatata

SEQ ID NO: 6533 - RNA, 33 nt, synthetic construct
  source 1..33: mol_type = other RNA
aaaaaaaaaaaaaaaaaaataaataaatatata

SEQ ID NO: 6534 - RNA, 33 nt, synthetic construct
  source 1..33: mol_type = other RNA
aaaaaaaaaaaaaaaaaaaaaaaaaataaataa

SEQ ID NO: 6535 - RNA, 33 nt, synthetic construct
  source 1..33: mol_type = other RNA
aaaaaaaaaaaaaaataaataaataaatatata

SEQ ID NO: 6536 - RNA, 33 nt, synthetic construct
  source 1..33: mol_type = other RNA
aaaaaaaaaaaaaaaaaaaaaataaataaataa

SEQ ID NO: 6537 - RNA, 33 nt, synthetic construct
  source 1..33: mol_type = other RNA
aaaaaaaaaaataaataaataaataaatatata

SEQ ID NO: 6538 - RNA, 33 nt, synthetic construct
  source 1..33: mol_type = other RNA
aaaaaaaaaaaaaaaaaaaaaaaaaaaaataaa

SEQ ID NO: 6539 - RNA, 33 nt, synthetic construct
  source 1..33: mol_type = other RNA
aaaaaaaaaaaaaaaaaataaataaataaataa

SEQ ID NO: 6540 - RNA, 33 nt, synthetic construct
  source 1..33: mol_type = other RNA
aaaaaaataaataaataaataaataaatatata

SEQ ID NO: 6541 - RNA, 33 nt, synthetic construct
  source 1..33: mol_type = other RNA
aaaaaaaaaaaaaaaaaaaaaaaaataaataaa

SEQ ID NO: 6542 - RNA, 33 nt, synthetic construct
  source 1..33: mol_type = other RNA
aaaaaaaaaaaaaataaataaataaataaataa

SEQ ID NO: 6543 - RNA, 33 nt, synthetic construct
  source 1..33: mol_type = other RNA
aaaaaaaaaaaaaaaaaaaaataaataaataaa

SEQ ID NO: 6544 - RNA, 33 nt, synthetic construct
  source 1..33: mol_type = other RNA
aaaaaaaaaataaataaataaataaataaataa

SEQ ID NO: 6545 - RNA, 33 nt, synthetic construct
  source 1..33: mol_type = other RNA
aaaaaaaaaaaaaaaaataaataaataaataaa

SEQ ID NO: 6546 - RNA, 33 nt, synthetic construct
  source 1..33: mol_type = other RNA
aaaaaataaataaataaataaataaataaataa

SEQ ID NO: 6547 - RNA, 33 nt, synthetic construct
  source 1..33: mol_type = other RNA
aaatataaataaatataaatataaataaatata

SEQ ID NO: 6548 - RNA, 33 nt, synthetic construct
  source 1..33: mol_type = other RNA
aaatataaatataaataaatataaataaatata

SEQ ID NO: 6549 - RNA, 33 nt, synthetic construct
  source 1..33: mol_type = other RNA
aaataaatataaatataaataaatataaatata

SEQ ID NO: 6550 - RNA, 33 nt, synthetic construct
  source 1..33: mol_type = other RNA
aaataaatataaataaatataaatataaatata

SEQ ID NO: 6551 - RNA, 33 nt, synthetic construct
  source 1..33: mol_type = other RNA
aaataaataaatataaatataaatataaatata

SEQ ID NO: 6552 - RNA, 33 nt, synthetic construct
  source 1..33: mol_type = other RNA
aaataaatataaatataaatataaataaatata

SEQ ID NO: 6553 - RNA, 33 nt, synthetic construct
  source 1..33: mol_type = other RNA
aaaaaaaaaaaaataaataaataaataaataaa

SEQ ID NO: 6554 - RNA, 33 nt, synthetic construct
  source 1..33: mol_type = other RNA
aaaaaaaaataaataaataaataaataaataaa

SEQ ID NO: 6555 - RNA, 33 nt, synthetic construct
  source 1..33: mol_type = other RNA
aaaaataaataaataaataaataaataaataaa

SEQ ID NO: 6556 - RNA, 33 nt, synthetic construct
  source 1..33: mol_type = other RNA
aaaaaaaaaaaaaaaaaaaaaaaaaaaaaatat

SEQ ID NO: 6557 - RNA, 33 nt, synthetic construct
  source 1..33: mol_type = other RNA
aaaaaaaaaaaaaaaaaaaaaaaaaataaatat

SEQ ID NO: 6558 - RNA, 33 nt, synthetic construct
  source 1..33: mol_type = other RNA
aaaaaaaaaaaaaaaaaaaaaataaataaatat

SEQ ID NO: 6559 - RNA, 33 nt, synthetic construct
  source 1..33: mol_type = other RNA
aaaaaaaaaaaaaaaaaataaataaataaatat

SEQ ID NO: 6560 - RNA, 33 nt, synthetic construct
  source 1..33: mol_type = other RNA
aaaaaaaaaaaaaataaataaataaataaatat

SEQ ID NO: 6561 - RNA, 33 nt, synthetic construct
  source 1..33: mol_type = other RNA
aaaaaaaaaataaataaataaataaataaatat

SEQ ID NO: 6562 - RNA, 33 nt, synthetic construct
  source 1..33: mol_type = other RNA
aaataaataaataaatataaatataaatatata

SEQ ID NO: 6563 - RNA, 33 nt, synthetic construct
  source 1..33: mol_type = other RNA
aaataaatataaatatataaataaataaatata

SEQ ID NO: 6564 - RNA, 33 nt, synthetic construct
  source 1..33: mol_type = other RNA
aaataaatatataaatataaataaataaatata

SEQ ID NO: 6565 - RNA, 33 nt, synthetic construct
  source 1..33: mol_type = other RNA
aaatatataaataaatataaataaataaatata

SEQ ID NO: 6566 - RNA, 33 nt, synthetic construct
  source 1..33: mol_type = other RNA
aaatatataaatataaataaataaataaatata

SEQ ID NO: 6567 - RNA, 33 nt, synthetic construct
  source 1..33: mol_type = other RNA
aaataaataaataaatatataaatataaatata

SEQ ID NO: 6568 - RNA, 33 nt, synthetic construct
  source 1..33: mol_type = other RNA
aaatataaataaatatataaataaataaatata

SEQ ID NO: 6569 - RNA, 33 nt, synthetic construct
  source 1..33: mol_type = other RNA
aaataaatataaataaatatataaataaatata

SEQ ID NO: 6570 - RNA, 33 nt, synthetic construct
  source 1..33: mol_type = other RNA
aaataaatatataaataaatataaataaatata

SEQ ID NO: 6571 - RNA, 33 nt, synthetic construct
  source 1..33: mol_type = other RNA
aaatataaatatataaataaataaataaatata

SEQ ID NO: 6572 - RNA, 33 nt, synthetic construct
  source 1..33: mol_type = other RNA
aaataaatataaataaataaatatataaatata

SEQ ID NO: 6573 - RNA, 33 nt, synthetic construct
  source 1..33: mol_type = other RNA
aaataaataaatataaataaatatataaatata

SEQ ID NO: 6574 - RNA, 33 nt, synthetic construct
  source 1..33: mol_type = other RNA
aaataaatataaataaatataaataaatatata

SEQ ID NO: 6575 - RNA, 33 nt, synthetic construct
  source 1..33: mol_type = other RNA
aaataaatataaataaataaatataaatatata

SEQ ID NO: 6576 - RNA, 33 nt, synthetic construct
  source 1..33: mol_type = other RNA
aaataaatataaatataaataaataaatatata

SEQ ID NO: 6577 - RNA, 33 nt, synthetic construct
  source 1..33: mol_type = other RNA
aaataaataaatataaatataaataaatatata

SEQ ID NO: 6578 - RNA, 33 nt, synthetic construct
  source 1..33: mol_type = other RNA
aaataaataaatataaataaatataaatatata

SEQ ID NO: 6579 - RNA, 33 nt, synthetic construct
  source 1..33: mol_type = other RNA
aaataaataaatatataaataaatataaatata

SEQ ID NO: 6580 - RNA, 33 nt, synthetic construct
  source 1..33: mol_type = other RNA
aaataaataaatatataaatataaataaatata

SEQ ID NO: 6581 - RNA, 33 nt, synthetic construct
  source 1..33: mol_type = other RNA
aaatataaataaatataaataaataaatatata

SEQ ID NO: 6582 - RNA, 33 nt, synthetic construct
  source 1..33: mol_type = other RNA
aaatataaatataaataaataaataaatatata

SEQ ID NO: 6583 - RNA, 33 nt, synthetic construct
  source 1..33: mol_type = other RNA
aaatataaataaataaatataaataaatatata

SEQ ID NO: 6584 - RNA, 33 nt, synthetic construct
  source 1..33: mol_type = other RNA
ataaataaataaataaataaataaataaatata

SEQ ID NO: 6585 - RNA, 33 nt, synthetic construct
  source 1..33: mol_type = other RNA
aaataaataaatatatataaataaataaatata

SEQ ID NO: 6586 - RNA, 33 nt, synthetic construct
  source 1..33: mol_type = other RNA
aaataaatatatataaataaataaataaatata

SEQ ID NO: 6587 - RNA, 33 nt, synthetic construct
  source 1..33: mol_type = other RNA
aaatatatataaataaataaataaataaatata

SEQ ID NO: 6588 - RNA, 33 nt, synthetic construct
  source 1..33: mol_type = other RNA
aaataaataaataaataaatatataaatatata

SEQ ID NO: 6589 - RNA, 33 nt, synthetic construct
  source 1..33: mol_type = other RNA
aaataaataaataaataaatatatataaatata

SEQ ID NO: 6590 - RNA, 33 nt, synthetic construct
  source 1..33: mol_type = other RNA
aaataaataaataaataaatataaatatatata

SEQ ID NO: 6591 - RNA, 33 nt, synthetic construct
  source 1..33: mol_type = other RNA
aaataaatataaataaataaataaatatatata

SEQ ID NO: 6592 - RNA, 33 nt, synthetic construct
  source 1..33: mol_type = other RNA
aaataaataaatatataaataaataaatatata

SEQ ID NO: 6593 - RNA, 33 nt, synthetic construct
  source 1..33: mol_type = other RNA
aaataaataaatataaataaataaatatatata

SEQ ID NO: 6594 - RNA, 33 nt, synthetic construct
  source 1..33: mol_type = other RNA
aaatatataaataaataaataaataaatatata

SEQ ID NO: 6595 - RNA, 33 nt, synthetic construct
  source 1..33: mol_type = other RNA
aaataaataaataaatatataaataaatatata

SEQ ID NO: 6596 - RNA, 33 nt, synthetic construct
  source 1..33: mol_type = other RNA
aaataaatatataaataaataaataaatatata

SEQ ID NO: 6597 - RNA, 33 nt, synthetic construct
  source 1..33: mol_type = other RNA
aaaaaaaaaaaaaaaaaaaaaaaaaaaaaaata

SEQ ID NO: 6598 - RNA, 33 nt, synthetic construct
  source 1..33: mol_type = other RNA
aaaaaaaaaaaaaaaaaaaaaaaaaaataaata

SEQ ID NO: 6599 - RNA, 33 nt, synthetic construct
  source 1..33: mol_type = other RNA
aaaaaaaaaaaaaaaaatataaatataaatata

SEQ ID NO: 6600 - RNA, 33 nt, synthetic construct
  source 1..33: mol_type = other RNA
aaaaaaaaaaaaaaaaaaaaaaataaataaata

SEQ ID NO: 6601 - RNA, 33 nt, synthetic construct
  source 1..33: mol_type = other RNA
aaaaaaaaaaaaatataaataaatataaatata

SEQ ID NO: 6602 - RNA, 33 nt, synthetic construct
  source 1..33: mol_type = other RNA
aaaaaaaaaaaaatataaatataaataaatata

SEQ ID NO: 6603 - RNA, 33 nt, synthetic construct
  source 1..33: mol_type = other RNA
aaaaaaaaaaaaataaatataaatataaatata

SEQ ID NO: 6604 - RNA, 33 nt, synthetic construct
  source 1..33: mol_type = other RNA
aaaaaaaaaaaaaaaaaaataaataaataaata

SEQ ID NO: 6605 - RNA, 33 nt, synthetic construct
  source 1..33: mol_type = other RNA
aaaaaaaaataaatataaataaatataaatata

SEQ ID NO: 6606 - RNA, 33 nt, synthetic construct
  source 1..33: mol_type = other RNA
aaaaaaaaatataaatataaataaataaatata

SEQ ID NO: 6607 - RNA, 33 nt, synthetic construct
  source 1..33: mol_type = other RNA
aaaaaaaaataaataaatataaatataaatata

SEQ ID NO: 6608 - RNA, 33 nt, synthetic construct
  source 1..33: mol_type = other RNA
aaaaaaaaatataaataaataaatataaatata

SEQ ID NO: 6609 - RNA, 33 nt, synthetic construct
  source 1..33: mol_type = other RNA
aaaaaaaaaaaaaaataaataaataaataaata

SEQ ID NO: 6610 - RNA, 33 nt, synthetic construct
  source 1..33: mol_type = other RNA
aaaaatataaataaatataaataaataaatata

SEQ ID NO: 6611 - RNA, 33 nt, synthetic construct
  source 1..33: mol_type = other RNA
aaaaatataaatataaataaataaataaatata

SEQ ID NO: 6612 - RNA, 33 nt, synthetic construct
  source 1..33: mol_type = other RNA
aaaaataaataaataaatataaatataaatata

SEQ ID NO: 6613 - RNA, 33 nt, synthetic construct
  source 1..33: mol_type = other RNA
aaatataaaaaaaaaaaaaaaaaaaaaaatata

SEQ ID NO: 6614 - RNA, 33 nt, synthetic construct
  source 1..33: mol_type = other RNA
aaaaaaaaaaataaataaataaataaataaata

SEQ ID NO: 6615 - RNA, 33 nt, synthetic construct
  source 1..33: mol_type = other RNA
aaatataaaaaaaaaaaaaaaaaaataaatata

SEQ ID NO: 6616 - RNA, 33 nt, synthetic construct
  source 1..33: mol_type = other RNA
aaataaaaaaaaaaaaaaaaaaatataaatata

SEQ ID NO: 6617 - RNA, 33 nt, synthetic construct
  source 1..33: mol_type = other RNA
aaatataaataaaaaaaaaaaaaaaaaaatata

SEQ ID NO: 6618 - RNA, 33 nt, synthetic construct
  source 1..33: mol_type = other RNA
aaataaatataaaaaaaaaaaaaaaaaaatata

SEQ ID NO: 6619 - RNA, 33 nt, synthetic construct
  source 1..33: mol_type = other RNA
aaataaataaatataaaaaaaaaaaaaaatata

SEQ ID NO: 6620 - RNA, 33 nt, synthetic construct
  source 1..33: mol_type = other RNA
aaataaaaaaaaaaaaaaataaatataaatata

SEQ ID NO: 6621 - RNA, 33 nt, synthetic construct
  source 1..33: mol_type = other RNA
aaataaatataaaaaaaaaaaaaaataaatata

SEQ ID NO: 6622 - RNA, 33 nt, synthetic construct
  source 1..33: mol_type = other RNA
aaataaaaaaaaaaaaaaatataaataaatata

SEQ ID NO: 6623 - RNA, 33 nt, synthetic construct
  source 1..33: mol_type = other RNA
aaatataaaaaaaaaaaaaaataaataaatata

SEQ ID NO: 6624 - RNA, 33 nt, synthetic construct
  source 1..33: mol_type = other RNA
aaatataaataaataaaaaaaaaaaaaaatata

SEQ ID NO: 6625 - RNA, 33 nt, synthetic construct
  source 1..33: mol_type = other RNA
aaatataaataaaaaaaaaaaaaaataaatata

SEQ ID NO: 6626 - RNA, 33 nt, synthetic construct
  source 1..33: mol_type = other RNA
aaataaataaaaaaaaaaaaaaatataaatata

SEQ ID NO: 6627 - RNA, 33 nt, synthetic construct
  source 1..33: mol_type = other RNA
aaataaatataaataaaaaaaaaaaaaaatata

SEQ ID NO: 6628 - RNA, 33 nt, synthetic construct
  source 1..33: mol_type = other RNA
aaataaataaatataaataaataaataaataat

SEQ ID NO: 6629 - RNA, 33 nt, synthetic construct
  source 1..33: mol_type = other RNA
aaataaataaataaatataaataaataaataat

SEQ ID NO: 6630 - RNA, 33 nt, synthetic construct
  source 1..33: mol_type = other RNA
aaataaatataaataaataaataaataaataat

SEQ ID NO: 6631 - RNA, 33 nt, synthetic construct
  source 1..33: mol_type = other RNA
aaatataaataaataaataaataaataaataat

SEQ ID NO: 6632 - RNA, 33 nt, synthetic construct
  source 1..33: mol_type = other RNA
aaataaataaataaataaataaatataaataat

SEQ ID NO: 6633 - RNA, 33 nt, synthetic construct
  source 1..33: mol_type = other RNA
aaataaataaataaataaataaataaatataat

SEQ ID NO: 6634 - RNA, 33 nt, synthetic construct
  source 1..33: mol_type = other RNA
aaataaataaataaataaatataaataaataat

SEQ ID NO: 6635 - RNA, 33 nt, synthetic construct
  source 1..33: mol_type = other RNA
aaataaatataaaaaaaaaaataaataaatata

SEQ ID NO: 6636 - RNA, 33 nt, synthetic construct
  source 1..33: mol_type = other RNA
aaataaataaatataaaaaaaaaaataaatata

SEQ ID NO: 6637 - RNA, 33 nt, synthetic construct
  source 1..33: mol_type = other RNA
aaataaataaatataaataaaaaaaaaaatata

SEQ ID NO: 6638 - RNA, 33 nt, synthetic construct
  source 1..33: mol_type = other RNA
aaataaatataaataaaaaaaaaaataaatata

SEQ ID NO: 6639 - RNA, 33 nt, synthetic construct
  source 1..33: mol_type = other RNA
aaataaaaaaaaaaatataaataaataaatata

SEQ ID NO: 6640 - RNA, 33 nt, synthetic construct
  source 1..33: mol_type = other RNA
aaataaataaataaatataaaaaaaaaaatata

SEQ ID NO: 6641 - RNA, 33 nt, synthetic construct
  source 1..33: mol_type = other RNA
aaataaaaaaaaaaataaataaatataaatata

SEQ ID NO: 6642 - RNA, 33 nt, synthetic construct
  source 1..33: mol_type = other RNA
aaataaataaaaaaaaaaataaatataaatata

SEQ ID NO: 6643 - RNA, 33 nt, synthetic construct
  source 1..33: mol_type = other RNA
aaataaataaataaaaaaaaaaatataaatata

SEQ ID NO: 6644 - RNA, 33 nt, synthetic construct
  source 1..33: mol_type = other RNA
aaatataaaaaaaaaaataaataaataaatata

SEQ ID NO: 6645 - RNA, 33 nt, synthetic construct
  source 1..33: mol_type = other RNA
aaataaaaaaaaaaataaatataaataaatata

SEQ ID NO: 6646 - RNA, 33 nt, synthetic construct
  source 1..33: mol_type = other RNA
aaatataaataaaaaaaaaaataaataaatata

SEQ ID NO: 6647 - RNA, 33 nt, synthetic construct
  source 1..33: mol_type = other RNA
aaatataaataaataaaaaaaaaaataaatata

SEQ ID NO: 6648 - RNA, 33 nt, synthetic construct
  source 1..33: mol_type = other RNA
aaataaataaaaaaaaaaatataaataaatata

SEQ ID NO: 6649 - RNA, 33 nt, synthetic construct
  source 1..33: mol_type = other RNA
aaataaatataaataaataaaaaaaaaaatata

SEQ ID NO: 6650 - RNA, 33 nt, synthetic construct
  source 1..33: mol_type = other RNA
aaataaataaataaataaataaatatatatata

SEQ ID NO: 6651 - RNA, 33 nt, synthetic construct
  source 1..33: mol_type = other RNA
aaaaaaaaaaaaaaaaaaaaatataaatatata

SEQ ID NO: 6652 - RNA, 33 nt, synthetic construct
  source 1..33: mol_type = other RNA
aaaaaaaaaaaaaaaaaaaaatatataaatata

SEQ ID NO: 6653 - RNA, 33 nt, synthetic construct
  source 1..33: mol_type = other RNA
aaataaatataaataaaaaaataaataaatata

SEQ ID NO: 6654 - RNA, 33 nt, synthetic construct
  source 1..33: mol_type = other RNA
aaatataaataaaaaaataaataaataaatata

SEQ ID NO: 6655 - RNA, 33 nt, synthetic construct
  source 1..33: mol_type = other RNA
aaataaatataaaaaaataaataaataaatata

SEQ ID NO: 6656 - RNA, 33 nt, synthetic construct
  source 1..33: mol_type = other RNA
aaataaaaaaataaatataaataaataaatata

SEQ ID NO: 6657 - RNA, 33 nt, synthetic construct
  source 1..33: mol_type = other RNA
aaataaataaataaatataaataaaaaaatata

SEQ ID NO: 6658 - RNA, 33 nt, synthetic construct
  source 1..33: mol_type = other RNA
aaataaaaaaatataaataaataaataaatata

SEQ ID NO: 6659 - RNA, 33 nt, synthetic construct
  source 1..33: mol_type = other RNA
aaataaataaaaaaatataaataaataaatata

SEQ ID NO: 6660 - RNA, 33 nt, synthetic construct
  source 1..33: mol_type = other RNA
aaataaatataaataaataaaaaaataaatata

SEQ ID NO: 6661 - RNA, 33 nt, synthetic construct
  source 1..33: mol_type = other RNA
aaataaataaataaatataaaaaaataaatata

SEQ ID NO: 6662 - RNA, 33 nt, synthetic construct
  source 1..33: mol_type = other RNA
aaataaataaatataaaaaaataaataaatata

SEQ ID NO: 6663 - RNA, 33 nt, synthetic construct
  source 1..33: mol_type = other RNA
aaataaataaataaataaatataaaaaaatata

SEQ ID NO: 6664 - RNA, 33 nt, synthetic construct
  source 1..33: mol_type = other RNA
aaataaataaataaaaaaataaatataaatata

SEQ ID NO: 6665 - RNA, 33 nt, synthetic construct
  source 1..33: mol_type = other RNA
aaataaataaaaaaataaataaatataaatata

SEQ ID NO: 6666 - RNA, 33 nt, synthetic construct
  source 1..33: mol_type = other RNA
aaataaaaaaataaataaataaatataaatata

SEQ ID NO: 6667 - RNA, 33 nt, synthetic construct
  source 1..33: mol_type = other RNA
aaataaataaataaataaaaaaatataaatata

SEQ ID NO: 6668 - RNA, 33 nt, synthetic construct
  source 1..33: mol_type = other RNA
aaatataaaaaaataaataaataaataaatata

SEQ ID NO: 6669 - RNA, 33 nt, synthetic construct
  source 1..33: mol_type = other RNA
aaatataaataaataaaaaaataaataaatata

SEQ ID NO: 6670 - RNA, 33 nt, synthetic construct
  source 1..33: mol_type = other RNA
aaataaataaaaaaataaatataaataaatata

SEQ ID NO: 6671 - RNA, 33 nt, synthetic construct
  source 1..33: mol_type = other RNA
aaatataaataaataaataaaaaaataaatata

SEQ ID NO: 6672 - RNA, 33 nt, synthetic construct
  source 1..33: mol_type = other RNA
aaataaatataaataaataaataaaaaaatata

SEQ ID NO: 6673 - RNA, 33 nt, synthetic construct
  source 1..33: mol_type = other RNA
aaataaataaatataaataaaaaaataaatata

SEQ ID NO: 6674 - RNA, 33 nt, synthetic construct
  source 1..33: mol_type = other RNA
aaataaataaataaaaaaatataaataaatata

SEQ ID NO: 6675 - RNA, 34 nt, synthetic construct
  source 1..34: mol_type = other RNA
aaataaataaataaataaataaataaataaataa

SEQ ID NO: 6676 - RNA, 34 nt, synthetic construct
  source 1..34: mol_type = other RNA
aaaaaaaaaaaaaaaaaaaaaaaaaaaaaatata

SEQ ID NO: 6677 - RNA, 34 nt, synthetic construct
  source 1..34: mol_type = other RNA
aaaaaaaaaaaaaaaaaaaaaaaaaataaatata

SEQ ID NO: 6678 - RNA, 34 nt, synthetic construct
  source 1..34: mol_type = other RNA
aaaaaaaaaaaaaaaaaaaaaataaataaatata

SEQ ID NO: 6679 - RNA, 34 nt, synthetic construct
  source 1..34: mol_type = other RNA
aaaaaaaaaaaaaaaaaataaataaataaatata

SEQ ID NO: 6680 - RNA, 34 nt, synthetic construct
  source 1..34: mol_type = other RNA
aaaaaaaaaaaaaataaataaataaataaatata

SEQ ID NO: 6681 - RNA, 34 nt, synthetic construct
  source 1..34: mol_type = other RNA
aaataaataaataaataaataaataaataaatat

SEQ ID NO: 6682 - RNA, 34 nt, synthetic construct
  source 1..34: mol_type = other RNA
aaaaaaaaaataaataaataaataaataaatata

SEQ ID NO: 6683 - RNA, 34 nt, synthetic construct
  source 1..34: mol_type = other RNA
aaaaaataaataaataaataaataaataaatata

SEQ ID NO: 6684 - RNA, 34 nt, synthetic construct
  source 1..34: mol_type = other RNA
aaaaaaaaaaaaaaaaaaaaaaaatataaatata

SEQ ID NO: 6685 - RNA, 34 nt, synthetic construct
  source 1..34: mol_type = other RNA
aataaataaataaataaataaataaataaatata

SEQ ID NO: 6686 - RNA, 34 nt, synthetic construct
  source 1..34: mol_type = other RNA
aaaaaaaaaaaaaaaaaaaataaatataaatata

SEQ ID NO: 6687 - RNA, 34 nt, synthetic construct
  source 1..34: mol_type = other RNA
aaaaaaaaaaaaaaaaaaaatataaataaatata

SEQ ID NO: 6688 - RNA, 34 nt, synthetic construct
  source 1..34: mol_type = other RNA
aaaaaaaaaaaaaaaataaataaatataaatata

SEQ ID NO: 6689 - RNA, 34 nt, synthetic construct
  source 1..34: mol_type = other RNA
aaaaaaaaaaaaaaaataaatataaataaatata

SEQ ID NO: 6690 - RNA, 34 nt, synthetic construct
  source 1..34: mol_type = other RNA
aaaaaaaaaaaaaaaatataaataaataaatata

SEQ ID NO: 6691 - RNA, 34 nt, synthetic construct
  source 1..34: mol_type = other RNA
aaaaaaaaaaaataaatataaataaataaatata

SEQ ID NO: 6692 - RNA, 34 nt, synthetic construct
  source 1..34: mol_type = other RNA
aaaaaaaaaaaataaataaataaatataaatata

SEQ ID NO: 6693 - RNA, 34 nt, synthetic construct
  source 1..34: mol_type = other RNA
aaaaaaaaaaaataaataaatataaataaatata

SEQ ID NO: 6694 - RNA, 34 nt, synthetic construct
  source 1..34: mol_type = other RNA
aaaaaaaaaaaatataaataaataaataaatata

SEQ ID NO: 6695 - RNA, 34 nt, synthetic construct
  source 1..34: mol_type = other RNA
aaaaaaaataaataaataaataaatataaatata

SEQ ID NO: 6696 - RNA, 34 nt, synthetic construct
  source 1..34: mol_type = other RNA
aaaaaaaataaataaataaatataaataaatata

SEQ ID NO: 6697 - RNA, 34 nt, synthetic construct
  source 1..34: mol_type = other RNA
aaaaaaaataaataaatataaataaataaatata

SEQ ID NO: 6698 - RNA, 34 nt, synthetic construct
  source 1..34: mol_type = other RNA
aaaaaaaatataaataaataaataaataaatata

SEQ ID NO: 6699 - RNA, 34 nt, synthetic construct
  source 1..34: mol_type = other RNA
aaaaaaaataaatataaataaataaataaatata

SEQ ID NO: 6700 - RNA, 34 nt, synthetic construct
  source 1..34: mol_type = other RNA
aaataaaaaaaaaaaaaaaaaaaaaaaaaatata

SEQ ID NO: 6701 - RNA, 34 nt, synthetic construct
  source 1..34: mol_type = other RNA
aaaataaatataaataaataaataaataaatata

SEQ ID NO: 6702 - RNA, 34 nt, synthetic construct
  source 1..34: mol_type = other RNA
aaaataaataaataaatataaataaataaatata

SEQ ID NO: 6703 - RNA, 34 nt, synthetic construct
  source 1..34: mol_type = other RNA
aaaataaataaatataaataaataaataaatata

SEQ ID NO: 6704 - RNA, 34 nt, synthetic construct
  source 1..34: mol_type = other RNA
aaaataaataaataaataaataaatataaatata

SEQ ID NO: 6705 - RNA, 34 nt, synthetic construct
  source 1..34: mol_type = other RNA
aaaataaataaataaataaatataaataaatata

SEQ ID NO: 6706 - RNA, 34 nt, synthetic construct
  source 1..34: mol_type = other RNA
aaaatataaataaataaataaataaataaatata

SEQ ID NO: 6707 - RNA, 34 nt, synthetic construct
  source 1..34: mol_type = other RNA
aaataaataaaaaaaaaaaaaaaaaaaaaatata

SEQ ID NO: 6708 - RNA, 34 nt, synthetic construct
  source 1..34: mol_type = other RNA
aaataaaaaaaaaaaaaaaaaaaaaataaatata

SEQ ID NO: 6709 - RNA, 34 nt, synthetic construct
  source 1..34: mol_type = other RNA
aaataaataaataaaaaaaaaaaaaaaaaatata

SEQ ID NO: 6710 - RNA, 34 nt, synthetic construct
  source 1..34: mol_type = other RNA
aaataaataaaaaaaaaaaaaaaaaataaatata

SEQ ID NO: 6711 - RNA, 34 nt, synthetic construct
  source 1..34: mol_type = other RNA
aaataaaaaaaaaaaaaaaaaataaataaatata

SEQ ID NO: 6712 - RNA, 34 nt, synthetic construct
  source 1..34: mol_type = other RNA
aaataaataaataaataaaaaaaaaaaaaatata

SEQ ID NO: 6713 - RNA, 34 nt, synthetic construct
  source 1..34: mol_type = other RNA
aaataaataaataaaaaaaaaaaaaataaatata

SEQ ID NO: 6714 - RNA, 34 nt, synthetic construct
  source 1..34: mol_type = other RNA
aaataaaaaaaaaaaaaataaataaataaatata

SEQ ID NO: 6715 - RNA, 34 nt, synthetic construct
  source 1..34: mol_type = other RNA
aaataaataaaaaaaaaaaaaataaataaatata

SEQ ID NO: 6716 - RNA, 34 nt, synthetic construct
  source 1..34: mol_type = other RNA
aaaaaaaaaaaaaaaaaaaaaaaaaaaatatata

SEQ ID NO: 6717 - RNA, 34 nt, synthetic construct
  source 1..34: mol_type = other RNA
aaataaataaataaataaataaaaaaaaaatata

SEQ ID NO: 6718 - RNA, 34 nt, synthetic construct
  source 1..34: mol_type = other RNA
aaataaataaataaataaaaaaaaaataaatata

SEQ ID NO: 6719 - RNA, 34 nt, synthetic construct
  source 1..34: mol_type = other RNA
aaataaataaataaaaaaaaaataaataaatata

SEQ ID NO: 6720 - RNA, 34 nt, synthetic construct
  source 1..34: mol_type = other RNA
aaataaataaaaaaaaaataaataaataaatata

SEQ ID NO: 6721 - RNA, 34 nt, synthetic construct
  source 1..34: mol_type = other RNA
aaataaaaaaaaaataaataaataaataaatata

SEQ ID NO: 6722 - RNA, 34 nt, synthetic construct
  source 1..34: mol_type = other RNA
aaaaaaaaaaaaaaaaaaaaaaaataaatatata

SEQ ID NO: 6723 - RNA, 34 nt, synthetic construct
  source 1..34: mol_type = other RNA
aaaaaaaaaaaaaaaaaaaaaaaaaaaaaaataa

SEQ ID NO: 6724 - RNA, 34 nt, synthetic construct
  source 1..34: mol_type = other RNA
aaaaaaaaaaaaaaaaaaaataaataaatatata

SEQ ID NO: 6725 - RNA, 34 nt, synthetic construct
  source 1..34: mol_type = other RNA
aaataaataaataaataaataaataaaaaatata

SEQ ID NO: 6726 - RNA, 34 nt, synthetic construct
  source 1..34: mol_type = other RNA
aaataaataaataaataaataaaaaataaatata

SEQ ID NO: 6727 - RNA, 34 nt, synthetic construct
  source 1..34: mol_type = other RNA
aaataaataaaaaataaataaataaataaatata

SEQ ID NO: 6728 - RNA, 34 nt, synthetic construct
  source 1..34: mol_type = other RNA
aaataaataaataaaaaataaataaataaatata

SEQ ID NO: 6729 - RNA, 34 nt, synthetic construct
  source 1..34: mol_type = other RNA
aaataaataaataaataaaaaataaataaatata

SEQ ID NO: 6730 - RNA, 34 nt, synthetic construct
  source 1..34: mol_type = other RNA
aaataaaaaataaataaataaataaataaatata

SEQ ID NO: 6731 - RNA, 34 nt, synthetic construct
  source 1..34: mol_type = other RNA
aaaaaaaaaaaaaaaaaaaaaaaaaaataaataa

SEQ ID NO: 6732 - RNA, 34 nt, synthetic construct
  source 1..34: mol_type = other RNA
aaaaaaaaaaaaaaaataaataaataaatatata

SEQ ID NO: 6733 - RNA, 34 nt, synthetic construct
  source 1..34: mol_type = other RNA
aaaaaaaaaaaaaaaaaaaaaaataaataaataa

SEQ ID NO: 6734 - RNA, 34 nt, synthetic construct
  source 1..34: mol_type = other RNA
aaaaaaaaaaaataaataaataaataaatatata

SEQ ID NO: 6735 - RNA, 34 nt, synthetic construct
  source 1..34: mol_type = other RNA
aaaaaaaaaaaaaaaaaaaaaaaaaaaaaataaa

SEQ ID NO: 6736 - RNA, 34 nt, synthetic construct
  source 1..34: mol_type = other RNA
aaaaaaaaaaaaaaaaaaataaataaataaataa

SEQ ID NO: 6737 - RNA, 34 nt, synthetic construct
  source 1..34: mol_type = other RNA
aaaaaaaataaataaataaataaataaatatata

SEQ ID NO: 6738 - RNA, 34 nt, synthetic construct
  source 1..34: mol_type = other RNA
aaaaaaaaaaaaaaaaaaaaaaaaaataaataaa

SEQ ID NO: 6739 - RNA, 34 nt, synthetic construct
  source 1..34: mol_type = other RNA
aaaaaaaaaaaaaaataaataaataaataaataa

SEQ ID NO: 6740 - RNA, 34 nt, synthetic construct
  source 1..34: mol_type = other RNA
aaaataaataaataaataaataaataaatatata

SEQ ID NO: 6741 - RNA, 34 nt, synthetic construct
  source 1..34: mol_type = other RNA
aaaaaaaaaaaaaaaaaaaaaataaataaataaa

SEQ ID NO: 6742 - RNA, 34 nt, synthetic construct
  source 1..34: mol_type = other RNA
aaaaaaaaaaataaataaataaataaataaataa

SEQ ID NO: 6743 - RNA, 34 nt, synthetic construct
  source 1..34: mol_type = other RNA
aaaaaaaaaaaaaaaaaataaataaataaataaa

SEQ ID NO: 6744 - RNA, 34 nt, synthetic construct
  source 1..34: mol_type = other RNA
aaaaaaataaataaataaataaataaataaataa

SEQ ID NO: 6745 - RNA, 34 nt, synthetic construct
  source 1..34: mol_type = other RNA
aaaaaaaaaaaaaataaataaataaataaataaa

SEQ ID NO: 6746 - RNA, 34 nt, synthetic construct
  source 1..34: mol_type = other RNA
aaaaaaaaaataaataaataaataaataaataaa

SEQ ID NO: 6747 - RNA, 34 nt, synthetic construct
  source 1..34: mol_type = other RNA
aaaaaataaataaataaataaataaataaataaa

SEQ ID NO: 6748 - RNA, 34 nt, synthetic construct
  source 1..34: mol_type = other RNA
aaaaaaaaaaaaaaaaaaaaaaaaaaaaaaatat

SEQ ID NO: 6749 - RNA, 34 nt, synthetic construct
  source 1..34: mol_type = other RNA
aaaaaaaaaaaaaaaaaaaaaaaaaaataaatat

SEQ ID NO: 6750 - RNA, 34 nt, synthetic construct
  source 1..34: mol_type = other RNA
aaaaaaaaaaaaaaaaaaaaaaataaataaatat

SEQ ID NO: 6751 - RNA, 34 nt, synthetic construct
  source 1..34: mol_type = other RNA
aaaaaaaaaaaaaaaaaaataaataaataaatat

SEQ ID NO: 6752 - RNA, 34 nt, synthetic construct
  source 1..34: mol_type = other RNA
aaaaaaaaaaaaaaataaataaataaataaatat

SEQ ID NO: 6753 - RNA, 34 nt, synthetic construct
  source 1..34: mol_type = other RNA
aaaaaaaaaaataaataaataaataaataaatat

SEQ ID NO: 6754 - RNA, 34 nt, synthetic construct
  source 1..34: mol_type = other RNA
aaaaaaataaataaataaataaataaataaatat

SEQ ID NO: 6755 - RNA, 34 nt, synthetic construct
  source 1..34: mol_type = other RNA
aaatataaataaatataaataaataaataaataa

SEQ ID NO: 6756 - RNA, 34 nt, synthetic construct
  source 1..34: mol_type = other RNA
aaatataaatataaataaataaataaataaataa

SEQ ID NO: 6757 - RNA, 34 nt, synthetic construct
  source 1..34: mol_type = other RNA
aaatataaataaataaatataaataaataaataa

SEQ ID NO: 6758 - RNA, 34 nt, synthetic construct
  source 1..34: mol_type = other RNA
aaatataaataaataaataaatataaataaataa

SEQ ID NO: 6759 - RNA, 34 nt, synthetic construct
  source 1..34: mol_type = other RNA
aaatataaataaataaataaataaatataaataa

SEQ ID NO: 6760 - RNA, 34 nt, synthetic construct
  source 1..34: mol_type = other RNA
aaataaataaataaataaatataaataaatataa

SEQ ID NO: 6761 - RNA, 34 nt, synthetic construct
  source 1..34: mol_type = other RNA
aaataaataaataaatataaataaataaatataa

SEQ ID NO: 6762 - RNA, 34 nt, synthetic construct
  source 1..34: mol_type = other RNA
aaataaatataaatataaataaataaataaataa

SEQ ID NO: 6763 - RNA, 34 nt, synthetic construct
  source 1..34: mol_type = other RNA
aaataaataaataaataaataaatataaatataa

SEQ ID NO: 6764 - RNA, 34 nt, synthetic construct
  source 1..34: mol_type = other RNA
aaataaataaataaatataaataaatataaataa

SEQ ID NO: 6765 - RNA, 34 nt, synthetic construct
  source 1..34: mol_type = other RNA
aaataaatataaataaataaataaatataaataa

SEQ ID NO: 6766 - RNA, 34 nt, synthetic construct
  source 1..34: mol_type = other RNA
aaataaatataaataaatataaataaataaataa

SEQ ID NO: 6767 - RNA, 34 nt, synthetic construct
  source 1..34: mol_type = other RNA
aaataaatataaataaataaataaataaatataa

SEQ ID NO: 6768 - RNA, 34 nt, synthetic construct
  source 1..34: mol_type = other RNA
aaataaatataaataaataaatataaataaataa

SEQ ID NO: 6769 - RNA, 34 nt, synthetic construct
  source 1..34: mol_type = other RNA
aaataaataaatataaatataaataaataaataa

SEQ ID NO: 6770 - RNA, 34 nt, synthetic construct
  source 1..34: mol_type = other RNA
aaataaataaatataaataaataaatataaataa

SEQ ID NO: 6771 - RNA, 34 nt, synthetic construct
  source 1..34: mol_type = other RNA
aaatataaataaataaataaataaataaatataa

SEQ ID NO: 6772 - RNA, 34 nt, synthetic construct
  source 1..34: mol_type = other RNA
aaataaataaatataaataaatataaataaataa

SEQ ID NO: 6773 - RNA, 34 nt, synthetic construct
  source 1..34: mol_type = other RNA
aaataaataaatataaataaataaataaatataa

SEQ ID NO: 6774 - RNA, 34 nt, synthetic construct
  source 1..34: mol_type = other RNA
aaataaataaataaataaatataaatataaataa

SEQ ID NO: 6775 - RNA, 34 nt, synthetic construct
  source 1..34: mol_type = other RNA
aaataaataaataaatataaatataaataaataa

SEQ ID NO: 6776 - RNA, 34 nt, synthetic construct
  source 1..34: mol_type = other RNA
aaataaataaataaataaataaataataaatata

SEQ ID NO: 6777 - RNA, 34 nt, synthetic construct
  source 1..34: mol_type = other RNA
aaataaataaataaataaataaataaataatata

SEQ ID NO: 6778 - RNA, 34 nt, synthetic construct
  source 1..34: mol_type = other RNA
aaataaataaataaataaataataaataaatata

SEQ ID NO: 6779 - RNA, 34 nt, synthetic construct
  source 1..34: mol_type = other RNA
aaataataaataaataaataaataaataaatata

SEQ ID NO: 6780 - RNA, 34 nt, synthetic construct
  source 1..34: mol_type = other RNA
aaataaataaataaataataaataaataaatata

SEQ ID NO: 6781 - RNA, 34 nt, synthetic construct
  source 1..34: mol_type = other RNA
aaataaataaataataaataaataaataaatata

SEQ ID NO: 6782 - RNA, 34 nt, synthetic construct
  source 1..34: mol_type = other RNA
aaaaaaaaaaaaaaaaaaaaaaaaaaaaaaaata

SEQ ID NO: 6783 - RNA, 34 nt, synthetic construct
  source 1..34: mol_type = other RNA
aaaaaaaaaaaaaaaaaaaaaaaaaaaataaata

SEQ ID NO: 6784 - RNA, 34 nt, synthetic construct
  source 1..34: mol_type = other RNA
aaaaaaaaaaaaaaaaaatataaatataaatata

SEQ ID NO: 6785 - RNA, 34 nt, synthetic construct
  source 1..34: mol_type = other RNA
aaaaaaaaaaaaaaaaaaaaaaaataaataaata

SEQ ID NO: 6786 - RNA, 34 nt, synthetic construct
  source 1..34: mol_type = other RNA
aaatatataaataaataaataaataaataaataa

SEQ ID NO: 6787 - RNA, 34 nt, synthetic construct
  source 1..34: mol_type = other RNA
aaataaataaataaataaataaataaatatataa

SEQ ID NO: 6788 - RNA, 34 nt, synthetic construct
  source 1..34: mol_type = other RNA
aaataaataaatatataaataaataaataaataa

SEQ ID NO: 6789 - RNA, 34 nt, synthetic construct
  source 1..34: mol_type = other RNA
aaataaatatataaataaataaataaataaataa

SEQ ID NO: 6790 - RNA, 34 nt, synthetic construct
  source 1..34: mol_type = other RNA
aaataaataaataaatatataaataaataaataa

SEQ ID NO: 6791 - RNA, 34 nt, synthetic construct
  source 1..34: mol_type = other RNA
aaataaataaataaataaataaatatataaataa

SEQ ID NO: 6792 - RNA, 34 nt, synthetic construct
  source 1..34: mol_type = other RNA
aaataaataaataaataaatatataaataaataa

SEQ ID NO: 6793 - RNA, 34 nt, synthetic construct
  source 1..34: mol_type = other RNA
aaaaaaaaaaaaaataaatataaatataaatata

SEQ ID NO: 6794 - RNA, 34 nt, synthetic construct
  source 1..34: mol_type = other RNA
aaaaaaaaaaaaaatataaatataaataaatata

SEQ ID NO: 6795 - RNA, 34 nt, synthetic construct
  source 1..34: mol_type = other RNA
aaaaaaaaaaaaaatataaataaatataaatata

SEQ ID NO: 6796 - RNA, 34 nt, synthetic construct
  source 1..34: mol_type = other RNA
aaatataaataaataaataaatataaataaatat

SEQ ID NO: 6797 - RNA, 34 nt, synthetic construct
  source 1..34: mol_type = other RNA
aaatataaataaataaataaataaatataaatat

SEQ ID NO: 6798 - RNA, 34 nt, synthetic construct
  source 1..34: mol_type = other RNA
aaataaataaataaatataaatataaataaatat

SEQ ID NO: 6799 - RNA, 34 nt, synthetic construct
  source 1..34: mol_type = other RNA
aaataaataaataaataaatataaatataaatat

SEQ ID NO: 6800 - RNA, 34 nt, synthetic construct
  source 1..34: mol_type = other RNA
aaatataaataaatataaataaataaataaatat

SEQ ID NO: 6801 - RNA, 34 nt, synthetic construct
  source 1..34: mol_type = other RNA
aaataaatataaatataaataaataaataaatat

SEQ ID NO: 6802 - RNA, 34 nt, synthetic construct
  source 1..34: mol_type = other RNA
aaataaataaataaatataaataaatataaatat

SEQ ID NO: 6803 - RNA, 34 nt, synthetic construct
  source 1..34: mol_type = other RNA
aaataaatataaataaataaataaatataaatat

SEQ ID NO: 6804 - RNA, 34 nt, synthetic construct
  source 1..34: mol_type = other RNA
aaataaatataaataaataaatataaataaatat

SEQ ID NO: 6805 - RNA, 34 nt, synthetic construct
  source 1..34: mol_type = other RNA
aaataaatataaataaatataaataaataaatat

SEQ ID NO: 6806 - RNA, 34 nt, synthetic construct
  source 1..34: mol_type = other RNA
aaataaataaatataaataaataaatataaatat

SEQ ID NO: 6807 - RNA, 34 nt, synthetic construct
  source 1..34: mol_type = other RNA
aaataaataaatataaataaatataaataaatat

SEQ ID NO: 6808 - RNA, 34 nt, synthetic construct
  source 1..34: mol_type = other RNA
aaataaataaatataaatataaataaataaatat

SEQ ID NO: 6809 - RNA, 34 nt, synthetic construct
  source 1..34: mol_type = other RNA
aaaaaaaaaaaaaaaaaaaataaataaataaata

SEQ ID NO: 6810 - RNA, 34 nt, synthetic construct
  source 1..34: mol_type = other RNA
aaaaaaaaaatataaataaataaatataaatata

SEQ ID NO: 6811 - RNA, 34 nt, synthetic construct
  source 1..34: mol_type = other RNA
aaaaaaaaaatataaataaatataaataaatata

SEQ ID NO: 6812 - RNA, 34 nt, synthetic construct
  source 1..34: mol_type = other RNA
aaaaaaaaaatataaatataaataaataaatata

SEQ ID NO: 6813 - RNA, 34 nt, synthetic construct
  source 1..34: mol_type = other RNA
aaaaaaaaaataaatataaatataaataaatata

SEQ ID NO: 6814 - RNA, 34 nt, synthetic construct
  source 1..34: mol_type = other RNA
aaaaaaaaaataaatataaataaatataaatata

SEQ ID NO: 6815 - RNA, 34 nt, synthetic construct
  source 1..34: mol_type = other RNA
aaaaaaaaaataaataaatataaatataaatata

SEQ ID NO: 6816 - RNA, 34 nt, synthetic construct
  source 1..34: mol_type = other RNA
aaaaaaaaaaaaaaaataaataaataaataaata

SEQ ID NO: 6817 - RNA, 34 nt, synthetic construct
  source 1..34: mol_type = other RNA
aaaaaataaatataaataaataaatataaatata

SEQ ID NO: 6818 - RNA, 34 nt, synthetic construct
  source 1..34: mol_type = other RNA
aaaaaatataaataaataaataaatataaatata

SEQ ID NO: 6819 - RNA, 34 nt, synthetic construct
  source 1..34: mol_type = other RNA
aaaaaatataaataaataaatataaataaatata

SEQ ID NO: 6820 - RNA, 34 nt, synthetic construct
  source 1..34: mol_type = other RNA
aaaaaatataaatataaataaataaataaatata

SEQ ID NO: 6821 - RNA, 34 nt, synthetic construct
  source 1..34: mol_type = other RNA
aaaaaatataaataaatataaataaataaatata

SEQ ID NO: 6822 - RNA, 34 nt, synthetic construct
  source 1..34: mol_type = other RNA
aaaaaataaataaatataaatataaataaatata

SEQ ID NO: 6823 - RNA, 34 nt, synthetic construct
  source 1..34: mol_type = other RNA
aaaaaataaatataaataaatataaataaatata

SEQ ID NO: 6824 - RNA, 34 nt, synthetic construct
  source 1..34: mol_type = other RNA
aaaaaataaatataaatataaataaataaatata

SEQ ID NO: 6825 - RNA, 34 nt, synthetic construct
  source 1..34: mol_type = other RNA
aaaaaataaataaatataaataaatataaatata

SEQ ID NO: 6826 - RNA, 34 nt, synthetic construct
  source 1..34: mol_type = other RNA
aaaaaataaataaataaatataaatataaatata

SEQ ID NO: 6827 - RNA, 34 nt, synthetic construct
  source 1..34: mol_type = other RNA
aaatataaaaaaaaaaaaaaaaaaaaaaaatata

SEQ ID NO: 6828 - RNA, 34 nt, synthetic construct
  source 1..34: mol_type = other RNA
aaaaaaaaaaaataaataaataaataaataaata

SEQ ID NO: 6829 - RNA, 34 nt, synthetic construct
  source 1..34: mol_type = other RNA
aaataaatataaaaaaaaaaaaaaaaaaaatata

SEQ ID NO: 6830 - RNA, 34 nt, synthetic construct
  source 1..34: mol_type = other RNA
aaataaaaaaaaaaaaaaaaaaaatataaatata

SEQ ID NO: 6831 - RNA, 34 nt, synthetic construct
  source 1..34: mol_type = other RNA
aaatataaataaaaaaaaaaaaaaaaaaaatata

SEQ ID NO: 6832 - RNA, 34 nt, synthetic construct
  source 1..34: mol_type = other RNA
aaatataaaaaaaaaaaaaaaaaaaataaatata

SEQ ID NO: 6833 - RNA, 34 nt, synthetic construct
  source 1..34: mol_type = other RNA
aaaaaaaataaataaataaataaataaataaata

SEQ ID NO: 6834 - RNA, 34 nt, synthetic construct
  source 1..34: mol_type = other RNA
aaataaataaaaaaaaaaaaaaaatataaatata

SEQ ID NO: 6835 - RNA, 34 nt, synthetic construct
  source 1..34: mol_type = other RNA
aaataaatataaataaaaaaaaaaaaaaaatata

SEQ ID NO: 6836 - RNA, 34 nt, synthetic construct
  source 1..34: mol_type = other RNA
aaataaataaatataaaaaaaaaaaaaaaatata

SEQ ID NO: 6837 - RNA, 34 nt, synthetic construct
  source 1..34: mol_type = other RNA
aaataaaaaaaaaaaaaaaataaatataaatata

SEQ ID NO: 6838 - RNA, 34 nt, synthetic construct
  source 1..34: mol_type = other RNA
aaatataaataaataaaaaaaaaaaaaaaatata

SEQ ID NO: 6839 - RNA, 34 nt, synthetic construct
  source 1..34: mol_type = other RNA
aaataaatataaaaaaaaaaaaaaaataaatata

SEQ ID NO: 6840 - RNA, 34 nt, synthetic construct
  source 1..34: mol_type = other RNA
aaataaaaaaaaaaaaaaaatataaataaatata

SEQ ID NO: 6841 - RNA, 34 nt, synthetic construct
  source 1..34: mol_type = other RNA
aaatataaataaaaaaaaaaaaaaaataaatata

SEQ ID NO: 6842 - RNA, 34 nt, synthetic construct
  source 1..34: mol_type = other RNA
aaatataaaaaaaaaaaaaaaataaataaatata

SEQ ID NO: 6843 - RNA, 34 nt, synthetic construct
  source 1..34: mol_type = other RNA
aaaataaataaataaataaataaataaataaata

SEQ ID NO: 6844 - RNA, 34 nt, synthetic construct
  source 1..34: mol_type = other RNA
aaataaatataaataaataaaaaaaaaaaatata

SEQ ID NO: 6845 - RNA, 34 nt, synthetic construct
  source 1..34: mol_type = other RNA
aaataaataaataaatataaaaaaaaaaaatata

SEQ ID NO: 6846 - RNA, 34 nt, synthetic construct
  source 1..34: mol_type = other RNA
aaataaataaatataaataaaaaaaaaaaatata

SEQ ID NO: 6847 - RNA, 34 nt, synthetic construct
  source 1..34: mol_type = other RNA
aaataaatataaataaaaaaaaaaaataaatata

SEQ ID NO: 6848 - RNA, 34 nt, synthetic construct
  source 1..34: mol_type = other RNA
aaataaataaataaaaaaaaaaaatataaatata

SEQ ID NO: 6849 - RNA, 34 nt, synthetic construct
  source 1..34: mol_type = other RNA
aaataaataaatataaaaaaaaaaaataaatata

SEQ ID NO: 6850 - RNA, 34 nt, synthetic construct
  source 1..34: mol_type = other RNA
aaataaaaaaaaaaaatataaataaataaatata

SEQ ID NO: 6851 - RNA, 34 nt, synthetic construct
  source 1..34: mol_type = other RNA
aaataaaaaaaaaaaataaataaatataaatata

SEQ ID NO: 6852 - RNA, 34 nt, synthetic construct
  source 1..34: mol_type = other RNA
aaatataaataaataaaaaaaaaaaataaatata

SEQ ID NO: 6853 - RNA, 34 nt, synthetic construct
  source 1..34: mol_type = other RNA
aaatataaataaaaaaaaaaaataaataaatata

SEQ ID NO: 6854 - RNA, 34 nt, synthetic construct
  source 1..34: mol_type = other RNA
aaatataaataaataaataaaaaaaaaaaatata

SEQ ID NO: 6855 - RNA, 34 nt, synthetic construct
  source 1..34: mol_type = other RNA
aaatataaaaaaaaaaaataaataaataaatata

SEQ ID NO: 6856 - RNA, 34 nt, synthetic construct
  source 1..34: mol_type = other RNA
aaataaatataaaaaaaaaaaataaataaatata

SEQ ID NO: 6857 - RNA, 34 nt, synthetic construct
  source 1..34: mol_type = other RNA
aaataaataaaaaaaaaaaatataaataaatata

SEQ ID NO: 6858 - RNA, 34 nt, synthetic construct
  source 1..34: mol_type = other RNA
aaataaataaaaaaaaaaaataaatataaatata

SEQ ID NO: 6859 - RNA, 34 nt, synthetic construct
  source 1..34: mol_type = other RNA
aaataaaaaaaaaaaataaatataaataaatata

SEQ ID NO: 6860 - RNA, 34 nt, synthetic construct
  source 1..34: mol_type = other RNA
aaataaataaataaatataaaaaaaataaatata

SEQ ID NO: 6861 - RNA, 34 nt, synthetic construct
  source 1..34: mol_type = other RNA
aaataaataaataaataaaaaaaatataaatata

SEQ ID NO: 6862 - RNA, 34 nt, synthetic construct
  source 1..34: mol_type = other RNA
aaataaaaaaaataaatataaataaataaatata

SEQ ID NO: 6863 - RNA, 34 nt, synthetic construct
  source 1..34: mol_type = other RNA
aaataaaaaaaataaataaatataaataaatata

SEQ ID NO: 6864 - RNA, 34 nt, synthetic construct
  source 1..34: mol_type = other RNA
aaatataaataaataaataaataaaaaaaatata

SEQ ID NO: 6865 - RNA, 34 nt, synthetic construct
  source 1..34: mol_type = other RNA
aaataaataaataaatataaataaaaaaaatata

SEQ ID NO: 6866 - RNA, 34 nt, synthetic construct
  source 1..34: mol_type = other RNA
aaataaataaataaataaatataaaaaaaatata

SEQ ID NO: 6867 - RNA, 34 nt, synthetic construct
  source 1..34: mol_type = other RNA
aaatataaataaataaaaaaaataaataaatata

SEQ ID NO: 6868 - RNA, 34 nt, synthetic construct
  source 1..34: mol_type = other RNA
aaataaatataaataaaaaaaataaataaatata

SEQ ID NO: 6869 - RNA, 34 nt, synthetic construct
  source 1..34: mol_type = other RNA
aaatataaataaataaataaaaaaaataaatata

SEQ ID NO: 6870 - RNA, 34 nt, synthetic construct
  source 1..34: mol_type = other RNA
aaataaatataaataaataaaaaaaataaatata

SEQ ID NO: 6871 - RNA, 34 nt, synthetic construct
  source 1..34: mol_type = other RNA
aaataaatataaaaaaaataaataaataaatata

SEQ ID NO: 6872 - RNA, 34 nt, synthetic construct
  source 1..34: mol_type = other RNA
aaatataaataaaaaaaataaataaataaatata

SEQ ID NO: 6873 - RNA, 34 nt, synthetic construct
  source 1..34: mol_type = other RNA
aaataaataaatataaaaaaaataaataaatata

SEQ ID NO: 6874 - RNA, 34 nt, synthetic construct
  source 1..34: mol_type = other RNA
aaataaaaaaaataaataaataaatataaatata

SEQ ID NO: 6875 - RNA, 34 nt, synthetic construct
  source 1..34: mol_type = other RNA
aaataaatataaataaataaataaaaaaaatata

SEQ ID NO: 6876 - RNA, 34 nt, synthetic construct
  source 1..34: mol_type = other RNA
aaataaataaatataaataaataaaaaaaatata

SEQ ID NO: 6877 - RNA, 34 nt, synthetic construct
  source 1..34: mol_type = other RNA
aaataaataaataaaaaaaataaatataaatata

SEQ ID NO: 6878 - RNA, 34 nt, synthetic construct
  source 1..34: mol_type = other RNA
aaataaataaataaaaaaaatataaataaatata

SEQ ID NO: 6879 - RNA, 34 nt, synthetic construct
  source 1..34: mol_type = other RNA
aaataaataaatataaataaaaaaaataaatata

SEQ ID NO: 6880 - RNA, 34 nt, synthetic construct
  source 1..34: mol_type = other RNA
aaatataaaaaaaataaataaataaataaatata

SEQ ID NO: 6881 - RNA, 34 nt, synthetic construct
  source 1..34: mol_type = other RNA
aaataaaaaaaatataaataaataaataaatata

SEQ ID NO: 6882 - RNA, 34 nt, synthetic construct
  source 1..34: mol_type = other RNA
aaataaataaaaaaaatataaataaataaatata

SEQ ID NO: 6883 - RNA, 35 nt, synthetic construct
  source 1..35: mol_type = other RNA
aaataaataaataaataaataaataaataaatata

SEQ ID NO: 6884 - RNA, 35 nt, synthetic construct
  source 1..35: mol_type = other RNA
aaataaataaataaataaataaataaataaataaa

SEQ ID NO: 6885 - RNA, 35 nt, synthetic construct
  source 1..35: mol_type = other RNA
aaaaaaaaaaaaaaaaaaaaaaaaaaaaaaatata

SEQ ID NO: 6886 - RNA, 35 nt, synthetic construct
  source 1..35: mol_type = other RNA
aaaaaaaaaaaaaaaaaaaaaaaaaaataaatata

SEQ ID NO: 6887 - RNA, 35 nt, synthetic construct
  source 1..35: mol_type = other RNA
aaaaaaaaaaaaaaaaaaaaaaataaataaatata

SEQ ID NO: 6888 - RNA, 35 nt, synthetic construct
  source 1..35: mol_type = other RNA
aaaaaaaaaaaaaaaaaaataaataaataaatata

SEQ ID NO: 6889 - RNA, 35 nt, synthetic construct
  source 1..35: mol_type = other RNA
aaaaaaaaaaaaaaataaataaataaataaatata

SEQ ID NO: 6890 - RNA, 35 nt, synthetic construct
  source 1..35: mol_type = other RNA
aaaaaaaaaaataaataaataaataaataaatata

SEQ ID NO: 6891 - RNA, 35 nt, synthetic construct
  source 1..35: mol_type = other RNA
aaaaaaataaataaataaataaataaataaatata

SEQ ID NO: 6892 - RNA, 35 nt, synthetic construct
  source 1..35: mol_type = other RNA
aaatataaataaataaataaatataaataaatata

SEQ ID NO: 6893 - RNA, 35 nt, synthetic construct
  source 1..35: mol_type = other RNA
aaataaatataaatataaataaataaataaatata

SEQ ID NO: 6894 - RNA, 35 nt, synthetic construct
  source 1..35: mol_type = other RNA
aaataaataaatataaatataaataaataaatata

SEQ ID NO: 6895 - RNA, 35 nt, synthetic construct
  source 1..35: mol_type = other RNA
aaataaatataaataaatataaataaataaatata

SEQ ID NO: 6896 - RNA, 35 nt, synthetic construct
  source 1..35: mol_type = other RNA
aaatataaataaataaataaataaatataaatata

SEQ ID NO: 6897 - RNA, 35 nt, synthetic construct
  source 1..35: mol_type = other RNA
aaataaataaatataaataaataaatataaatata

SEQ ID NO: 6898 - RNA, 35 nt, synthetic construct
  source 1..35: mol_type = other RNA
aaataaatataaataaataaataaatataaatata

SEQ ID NO: 6899 - RNA, 35 nt, synthetic construct
  source 1..35: mol_type = other RNA
aaataaatataaataaataaatataaataaatata

SEQ ID NO: 6900 - RNA, 35 nt, synthetic construct
  source 1..35: mol_type = other RNA
aaatataaataaataaatataaataaataaatata

SEQ ID NO: 6901 - RNA, 35 nt, synthetic construct
  source 1..35: mol_type = other RNA
aaataaataaataaatataaataaatataaatata

SEQ ID NO: 6902 - RNA, 35 nt, synthetic construct
  source 1..35: mol_type = other RNA
aaataaataaatataaataaatataaataaatata

SEQ ID NO: 6903 - RNA, 35 nt, synthetic construct
  source 1..35: mol_type = other RNA
aaataaataaataaatataaatataaataaatata

SEQ ID NO: 6904 - RNA, 35 nt, synthetic construct
  source 1..35: mol_type = other RNA
aaatataaatataaataaataaataaataaatata

SEQ ID NO: 6905 - RNA, 35 nt, synthetic construct
  source 1..35: mol_type = other RNA
aaatataaataaatataaataaataaataaatata

SEQ ID NO: 6906 - RNA, 35 nt, synthetic construct
  source 1..35: mol_type = other RNA
aaataaataaataaataaatataaatataaatata

SEQ ID NO: 6907 - RNA, 35 nt, synthetic construct
  source 1..35: mol_type = other RNA
aaataaataaataaatataaataaataaatatata

SEQ ID NO: 6908 - RNA, 35 nt, synthetic construct
  source 1..35: mol_type = other RNA
aaataaatatataaataaataaataaataaatata

SEQ ID NO: 6909 - RNA, 35 nt, synthetic construct
  source 1..35: mol_type = other RNA
aaataaataaatatataaataaataaataaatata

SEQ ID NO: 6910 - RNA, 35 nt, synthetic construct
  source 1..35: mol_type = other RNA
aaataaataaataaatatataaataaataaatata

SEQ ID NO: 6911 - RNA, 35 nt, synthetic construct
  source 1..35: mol_type = other RNA
aaataaataaataaataaataaatatataaatata

SEQ ID NO: 6912 - RNA, 35 nt, synthetic construct
  source 1..35: mol_type = other RNA
aaataaataaataaataaatatataaataaatata

SEQ ID NO: 6913 - RNA, 35 nt, synthetic construct
  source 1..35: mol_type = other RNA
aaataaataaataaataaatataaataaatatata

SEQ ID NO: 6914 - RNA, 35 nt, synthetic construct
  source 1..35: mol_type = other RNA
aaataaataaatataaataaataaataaatatata

SEQ ID NO: 6915 - RNA, 35 nt, synthetic construct
  source 1..35: mol_type = other RNA
aaatatataaataaataaataaataaataaatata

SEQ ID NO: 6916 - RNA, 35 nt, synthetic construct
  source 1..35: mol_type = other RNA
aaatataaataaataaataaataaataaatatata

SEQ ID NO: 6917 - RNA, 35 nt, synthetic construct
  source 1..35: mol_type = other RNA
aaataaatataaataaataaataaataaatatata

SEQ ID NO: 6918 - RNA, 35 nt, synthetic construct
  source 1..35: mol_type = other RNA
aaaaaaaaaaaaaaaaaaaaaaaaatataaatata

SEQ ID NO: 6919 - RNA, 35 nt, synthetic construct
  source 1..35: mol_type = other RNA
aaataaataaataaataaataaataaatatatata

SEQ ID NO: 6920 - RNA, 35 nt, synthetic construct
  source 1..35: mol_type = other RNA
aaaaaaaaaaaaaaaaaaaaataaatataaatata

SEQ ID NO: 6921 - RNA, 35 nt, synthetic construct
  source 1..35: mol_type = other RNA
aaaaaaaaaaaaaaaaaaaaatataaataaatata

SEQ ID NO: 6922 - RNA, 35 nt, synthetic construct
  source 1..35: mol_type = other RNA
aaaaaaaaaaaaaaaaataaataaatataaatata

SEQ ID NO: 6923 - RNA, 35 nt, synthetic construct
  source 1..35: mol_type = other RNA
aaaaaaaaaaaaaaaaatataaataaataaatata

SEQ ID NO: 6924 - RNA, 35 nt, synthetic construct
  source 1..35: mol_type = other RNA
aaaaaaaaaaaaaaaaataaatataaataaatata

SEQ ID NO: 6925 - RNA, 35 nt, synthetic construct
  source 1..35: mol_type = other RNA
aaaaaaaaaaaaataaataaataaatataaatata

SEQ ID NO: 6926 - RNA, 35 nt, synthetic construct
  source 1..35: mol_type = other RNA
aaaaaaaaaaaaataaataaatataaataaatata

SEQ ID NO: 6927 - RNA, 35 nt, synthetic construct
  source 1..35: mol_type = other RNA
aaaaaaaaaaaaatataaataaataaataaatata

SEQ ID NO: 6928 - RNA, 35 nt, synthetic construct
  source 1..35: mol_type = other RNA
aaaaaaaaaaaaataaatataaataaataaatata

SEQ ID NO: 6929 - RNA, 35 nt, synthetic construct
  source 1..35: mol_type = other RNA
aaaaaaaaatataaataaataaataaataaatata

SEQ ID NO: 6930 - RNA, 35 nt, synthetic construct
  source 1..35: mol_type = other RNA
aaaaaaaaataaatataaataaataaataaatata

SEQ ID NO: 6931 - RNA, 35 nt, synthetic construct
  source 1..35: mol_type = other RNA
aaaaaaaaataaataaataaatataaataaatata

SEQ ID NO: 6932 - RNA, 35 nt, synthetic construct
  source 1..35: mol_type = other RNA
aaaaaaaaataaataaataaataaatataaatata

SEQ ID NO: 6933 - RNA, 35 nt, synthetic construct
  source 1..35: mol_type = other RNA
aaaaaaaaataaataaatataaataaataaatata

SEQ ID NO: 6934 - RNA, 35 nt, synthetic construct
  source 1..35: mol_type = other RNA
aaataaaaaaaaaaaaaaaaaaaaaaaaaaatata

SEQ ID NO: 6935 - RNA, 35 nt, synthetic construct
  source 1..35: mol_type = other RNA
aaaaataaataaataaataaatataaataaatata

SEQ ID NO: 6936 - RNA, 35 nt, synthetic construct
  source 1..35: mol_type = other RNA
aaaaataaataaataaataaataaatataaatata

SEQ ID NO: 6937 - RNA, 35 nt, synthetic construct
  source 1..35: mol_type = other RNA
aaaaataaataaataaatataaataaataaatata

SEQ ID NO: 6938 - RNA, 35 nt, synthetic construct
  source 1..35: mol_type = other RNA
aaaaataaataaatataaataaataaataaatata

SEQ ID NO: 6939 - RNA, 35 nt, synthetic construct
  source 1..35: mol_type = other RNA
aaaaataaatataaataaataaataaataaatata

SEQ ID NO: 6940 - RNA, 35 nt, synthetic construct
  source 1..35: mol_type = other RNA
aaaaatataaataaataaataaataaataaatata

SEQ ID NO: 6941 - RNA, 35 nt, synthetic construct
  source 1..35: mol_type = other RNA
aaataaataaaaaaaaaaaaaaaaaaaaaaatata

SEQ ID NO: 6942 - RNA, 35 nt, synthetic construct
  source 1..35: mol_type = other RNA
aaataaaaaaaaaaaaaaaaaaaaaaataaatata

SEQ ID NO: 6943 - RNA, 35 nt, synthetic construct
  source 1..35: mol_type = other RNA
aaataaataaataaaaaaaaaaaaaaaaaaatata

SEQ ID NO: 6944 - RNA, 35 nt, synthetic construct
  source 1..35: mol_type = other RNA
aaataaataaaaaaaaaaaaaaaaaaataaatata

SEQ ID NO: 6945 - RNA, 35 nt, synthetic construct
  source 1..35: mol_type = other RNA
aaataaaaaaaaaaaaaaaaaaataaataaatata

SEQ ID NO: 6946 - RNA, 35 nt, synthetic construct
  source 1..35: mol_type = other RNA
aaataaataaataaataaaaaaaaaaaaaaatata

SEQ ID NO: 6947 - RNA, 35 nt, synthetic construct
  source 1..35: mol_type = other RNA
aaataaataaataaaaaaaaaaaaaaataaatata

SEQ ID NO: 6948 - RNA, 35 nt, synthetic construct
  source 1..35: mol_type = other RNA
aaataaataaaaaaaaaaaaaaataaataaatata

SEQ ID NO: 6949 - RNA, 35 nt, synthetic construct
  source 1..35: mol_type = other RNA
aaataaaaaaaaaaaaaaataaataaataaatata

SEQ ID NO: 6950 - RNA, 35 nt, synthetic construct
  source 1..35: mol_type = other RNA
aaaaaaaaaaaaaaaaaaaaaaaaaaaaatatata

SEQ ID NO: 6951 - RNA, 35 nt, synthetic construct
  source 1..35: mol_type = other RNA
aaataaataaataaataaataaataaataaataat

SEQ ID NO: 6952 - RNA, 35 nt, synthetic construct
  source 1..35: mol_type = other RNA
aaataaataaataaataaataaaaaaaaaaatata

SEQ ID NO: 6953 - RNA, 35 nt, synthetic construct
  source 1..35: mol_type = other RNA
aaataaataaataaaaaaaaaaataaataaatata

SEQ ID NO: 6954 - RNA, 35 nt, synthetic construct
  source 1..35: mol_type = other RNA
aaataaataaataaataaaaaaaaaaataaatata

SEQ ID NO: 6955 - RNA, 35 nt, synthetic construct
  source 1..35: mol_type = other RNA
aaataaataaaaaaaaaaataaataaataaatata

SEQ ID NO: 6956 - RNA, 35 nt, synthetic construct
  source 1..35: mol_type = other RNA
aaataaaaaaaaaaataaataaataaataaatata

SEQ ID NO: 6957 - RNA, 35 nt, synthetic construct
  source 1..35: mol_type = other RNA
aaaaaaaaaaaaaaaaaaaaaaaaataaatatata

SEQ ID NO: 6958 - RNA, 35 nt, synthetic construct
  source 1..35: mol_type = other RNA
aaaaaaaaaaaaaaaaaaaaaaaaaaaaaaaataa

SEQ ID NO: 6959 - RNA, 35 nt, synthetic construct
  source 1..35: mol_type = other RNA
aaataaataaataaataaataaataaaaaaatata

SEQ ID NO: 6960 - RNA, 35 nt, synthetic construct
  source 1..35: mol_type = other RNA
aaataaataaataaaaaaataaataaataaatata

SEQ ID NO: 6961 - RNA, 35 nt, synthetic construct
  source 1..35: mol_type = other RNA
aaataaaaaaataaataaataaataaataaatata

SEQ ID NO: 6962 - RNA, 35 nt, synthetic construct
  source 1..35: mol_type = other RNA
aaataaataaataaataaataaaaaaataaatata

SEQ ID NO: 6963 - RNA, 35 nt, synthetic construct
  source 1..35: mol_type = other RNA
aaataaataaataaataaaaaaataaataaatata

SEQ ID NO: 6964 - RNA, 35 nt, synthetic construct
  source 1..35: mol_type = other RNA
aaataaataaaaaaataaataaataaataaatata

SEQ ID NO: 6965 - RNA, 35 nt, synthetic construct
  source 1..35: mol_type = other RNA
aaaaaaaaaaaaaaaaaaaaataaataaatatata

SEQ ID NO: 6966 - RNA, 35 nt, synthetic construct
  source 1..35: mol_type = other RNA
aaaaaaaaaaaaaaaaaaaaaaaaaaaataaataa

SEQ ID NO: 6967 - RNA, 35 nt, synthetic construct
  source 1..35: mol_type = other RNA
aaaaaaaaaaaaaaaaataaataaataaatatata

SEQ ID NO: 6968 - RNA, 35 nt, synthetic construct
  source 1..35: mol_type = other RNA
aaaaaaaaaaaaaaaaaaaaaaaataaataaataa

SEQ ID NO: 6969 - RNA, 35 nt, synthetic construct
  source 1..35: mol_type = other RNA
aaaaaaaaaaaaataaataaataaataaatatata

SEQ ID NO: 6970 - RNA, 35 nt, synthetic construct
  source 1..35: mol_type = other RNA
aaaaaaaaaaaaaaaaaaaaaaaaaaaaaaataaa

SEQ ID NO: 6971 - RNA, 35 nt, synthetic construct
  source 1..35: mol_type = other RNA
aaaaaaaaaaaaaaaaaaaataaataaataaataa

SEQ ID NO: 6972 - RNA, 35 nt, synthetic construct
  source 1..35: mol_type = other RNA
aaaaaaaaataaataaataaataaataaatatata

SEQ ID NO: 6973 - RNA, 35 nt, synthetic construct
  source 1..35: mol_type = other RNA
aaaaaaaaaaaaaaaaaaaaaaaaaaataaataaa

SEQ ID NO: 6974 - RNA, 35 nt, synthetic construct
  source 1..35: mol_type = other RNA
aaaaaaaaaaaaaaaataaataaataaataaataa

SEQ ID NO: 6975 - RNA, 35 nt, synthetic construct
  source 1..35: mol_type = other RNA
aaaaataaataaataaataaataaataaatatata

SEQ ID NO: 6976 - RNA, 35 nt, synthetic construct
  source 1..35: mol_type = other RNA
aaaaaaaaaaaaaaaaaaaaaaataaataaataaa

SEQ ID NO: 6977 - RNA, 35 nt, synthetic construct
  source 1..35: mol_type = other RNA
aaaaaaaaaaaataaataaataaataaataaataa

SEQ ID NO: 6978 - RNA, 35 nt, synthetic construct
  source 1..35: mol_type = other RNA
aaaaaaaaaaaaaaaaaaataaataaataaataaa

SEQ ID NO: 6979 - RNA, 35 nt, synthetic construct
  source 1..35: mol_type = other RNA
aaaaaaaataaataaataaataaataaataaataa

SEQ ID NO: 6980 - RNA, 35 nt, synthetic construct
  source 1..35: mol_type = other RNA
aaaaaaaaaaaaaaataaataaataaataaataaa

SEQ ID NO: 6981 - RNA, 35 nt, synthetic construct
  source 1..35: mol_type = other RNA
aaaataaataaataaataaataaataaataaataa

SEQ ID NO: 6982 - RNA, 35 nt, synthetic construct
  source 1..35: mol_type = other RNA
aaaaaaaaaaataaataaataaataaataaataaa

SEQ ID NO: 6983 - RNA, 35 nt, synthetic construct
  source 1..35: mol_type = other RNA
aaaaaaataaataaataaataaataaataaataaa

SEQ ID NO: 6984 - RNA, 35 nt, synthetic construct
  source 1..35: mol_type = other RNA
aaaaaaaaaaaaaaaaaaaaaaaaaaaaaaaatat

SEQ ID NO: 6985 - RNA, 35 nt, synthetic construct
  source 1..35: mol_type = other RNA
aaataaataaataaatataaataaataaataaata

SEQ ID NO: 6986 - RNA, 35 nt, synthetic construct
  source 1..35: mol_type = other RNA
aaataaataaataaataaataaataaatataaata

SEQ ID NO: 6987 - RNA, 35 nt, synthetic construct
  source 1..35: mol_type = other RNA
aaataaataaataaataaatataaataaataaata

SEQ ID NO: 6988 - RNA, 35 nt, synthetic construct
  source 1..35: mol_type = other RNA
aaataaatataaataaataaataaataaataaata

SEQ ID NO: 6989 - RNA, 35 nt, synthetic construct
  source 1..35: mol_type = other RNA
aaataaataaatataaataaataaataaataaata

SEQ ID NO: 6990 - RNA, 35 nt, synthetic construct
  source 1..35: mol_type = other RNA
aaatataaataaataaataaataaataaataaata

SEQ ID NO: 6991 - RNA, 35 nt, synthetic construct
  source 1..35: mol_type = other RNA
aaaaaaaaaaaaaaaaaaaaaaaaaaaataaatat

SEQ ID NO: 6992 - RNA, 35 nt, synthetic construct
  source 1..35: mol_type = other RNA
aaaaaaaaaaaaaaaaaaaaaaaataaataaatat

SEQ ID NO: 6993 - RNA, 35 nt, synthetic construct
  source 1..35: mol_type = other RNA
aaaaaaaaaaaaaaaaaaaataaataaataaatat

SEQ ID NO: 6994 - RNA, 35 nt, synthetic construct
  source 1..35: mol_type = other RNA
aaaaaaaaaaaaaaaataaataaataaataaatat

SEQ ID NO: 6995 - RNA, 35 nt, synthetic construct
  source 1..35: mol_type = other RNA
aaaaaaaaaaaataaataaataaataaataaatat

SEQ ID NO: 6996 - RNA, 35 nt, synthetic construct
  source 1..35: mol_type = other RNA
aaaaaaaataaataaataaataaataaataaatat

SEQ ID NO: 6997 - RNA, 35 nt, synthetic construct
  source 1..35: mol_type = other RNA
aaaataaataaataaataaataaataaataaatat

SEQ ID NO: 6998 - RNA, 35 nt, synthetic construct
  source 1..35: mol_type = other RNA
aaatataaataaataaataaatataaataaataaa

SEQ ID NO: 6999 - RNA, 35 nt, synthetic construct
  source 1..35: mol_type = other RNA
aaataaataaataaatataaataaataaatataaa

SEQ ID NO: 7000 - RNA, 35 nt, synthetic construct
  source 1..35: mol_type = other RNA
aaatataaataaataaatataaataaataaataaa

SEQ ID NO: 7001 - RNA, 35 nt, synthetic construct
  source 1..35: mol_type = other RNA
aaataaataaatataaataaataaataaatataaa

SEQ ID NO: 7002 - RNA, 35 nt, synthetic construct
  source 1..35: mol_type = other RNA
aaataaatataaataaataaataaataaatataaa

SEQ ID NO: 7003 - RNA, 35 nt, synthetic construct
  source 1..35: mol_type = other RNA
aaataaatataaatataaataaataaataaataaa

SEQ ID NO: 7004 - RNA, 35 nt, synthetic construct
  source 1..35: mol_type = other RNA
aaataaataaatataaatataaataaataaataaa

SEQ ID NO: 7005 - RNA, 35 nt, synthetic construct
  source 1..35: mol_type = other RNA
aaataaataaataaataaataaatataaatataaa

SEQ ID NO: 7006 - RNA, 35 nt, synthetic construct
  source 1..35: mol_type = other RNA
aaatataaataaataaataaataaatataaataaa

SEQ ID NO: 7007 - RNA, 35 nt, synthetic construct
  source 1..35: mol_type = other RNA
aaataaatataaataaataaatataaataaataaa

SEQ ID NO: 7008 - RNA, 35 nt, synthetic construct
  source 1..35: mol_type = other RNA
aaataaatataaataaataaataaatataaataaa

SEQ ID NO: 7009 - RNA, 35 nt, synthetic construct
  source 1..35: mol_type = other RNA
aaataaataaataaatataaataaatataaataaa

SEQ ID NO: 7010 - RNA, 35 nt, synthetic construct
  source 1..35: mol_type = other RNA
aaataaatataaataaatataaataaataaataaa

SEQ ID NO: 7011 - RNA, 35 nt, synthetic construct
  source 1..35: mol_type = other RNA
aaataaataaataaataaatataaataaatataaa

SEQ ID NO: 7012 - RNA, 35 nt, synthetic construct
  source 1..35: mol_type = other RNA
aaatataaatataaataaataaataaataaataaa

SEQ ID NO: 7013 - RNA, 35 nt, synthetic construct
  source 1..35: mol_type = other RNA
aaataaataaataaatataaatataaataaataaa

SEQ ID NO: 7014 - RNA, 35 nt, synthetic construct
  source 1..35: mol_type = other RNA
aaataaataaatataaataaatataaataaataaa

SEQ ID NO: 7015 - RNA, 35 nt, synthetic construct
  source 1..35: mol_type = other RNA
aaatataaataaatataaataaataaataaataaa

SEQ ID NO: 7016 - RNA, 35 nt, synthetic construct
  source 1..35: mol_type = other RNA
aaataaataaataaataaatataaatataaataaa

SEQ ID NO: 7017 - RNA, 35 nt, synthetic construct
  source 1..35: mol_type = other RNA
aaaaaaaaaaaaaaaaaaaaaaaaaaaaaaaaata

SEQ ID NO: 7018 - RNA, 35 nt, synthetic construct
  source 1..35: mol_type = other RNA
aaaaaaaaaaaaaaaaaaaaaaaaaaaaataaata

SEQ ID NO: 7019 - RNA, 35 nt, synthetic construct
  source 1..35: mol_type = other RNA
aaaaaaaaaaaaaaaaaaatataaatataaatata

SEQ ID NO: 7020 - RNA, 35 nt, synthetic construct
  source 1..35: mol_type = other RNA
aaaaaaaaaaaaaaaaaaaaaaaaataaataaata

SEQ ID NO: 7021 - RNA, 35 nt, synthetic construct
  source 1..35: mol_type = other RNA
aaaaaaaaaaaaaaataaatataaatataaatata

SEQ ID NO: 7022 - RNA, 35 nt, synthetic construct
  source 1..35: mol_type = other RNA
aaaaaaaaaaaaaaatataaataaatataaatata

SEQ ID NO: 7023 - RNA, 35 nt, synthetic construct
  source 1..35: mol_type = other RNA
aaaaaaaaaaaaaaatataaatataaataaatata

SEQ ID NO: 7024 - RNA, 35 nt, synthetic construct
  source 1..35: mol_type = other RNA
aaaaaaaaaaaaaaaaaaaaataaataaataaata

SEQ ID NO: 7025 - RNA, 35 nt, synthetic construct
  source 1..35: mol_type = other RNA
aaaaaaaaaaataaataaatataaatataaatata

SEQ ID NO: 7026 - RNA, 35 nt, synthetic construct
  source 1..35: mol_type = other RNA
aaaaaaaaaaataaatataaatataaataaatata

SEQ ID NO: 7027 - RNA, 35 nt, synthetic construct
  source 1..35: mol_type = other RNA
aaaaaaaaaaatataaatataaataaataaatata

SEQ ID NO: 7028 - RNA, 35 nt, synthetic construct
  source 1..35: mol_type = other RNA
aaaaaaaaaaatataaataaatataaataaatata

SEQ ID NO: 7029 - RNA, 35 nt, synthetic construct
  source 1..35: mol_type = other RNA
aaaaaaaaaaatataaataaataaatataaatata

SEQ ID NO: 7030 - RNA, 35 nt, synthetic construct
  source 1..35: mol_type = other RNA
aaaaaaaaaaataaatataaataaatataaatata

SEQ ID NO: 7031 - RNA, 35 nt, synthetic construct
  source 1..35: mol_type = other RNA
aaaaaaaaaaaaaaaaataaataaataaataaata

SEQ ID NO: 7032 - RNA, 35 nt, synthetic construct
  source 1..35: mol_type = other RNA
aaaaaaatataaatataaataaataaataaatata

SEQ ID NO: 7033 - RNA, 35 nt, synthetic construct
  source 1..35: mol_type = other RNA
aaaaaaatataaataaataaatataaataaatata

SEQ ID NO: 7034 - RNA, 35 nt, synthetic construct
  source 1..35: mol_type = other RNA
aaaaaaataaatataaatataaataaataaatata

SEQ ID NO: 7035 - RNA, 35 nt, synthetic construct
  source 1..35: mol_type = other RNA
aaaaaaatataaataaatataaataaataaatata

SEQ ID NO: 7036 - RNA, 35 nt, synthetic construct
  source 1..35: mol_type = other RNA
aaaaaaataaataaatataaatataaataaatata

SEQ ID NO: 7037 - RNA, 35 nt, synthetic construct
  source 1..35: mol_type = other RNA
aaaaaaataaatataaataaatataaataaatata

SEQ ID NO: 7038 - RNA, 35 nt, synthetic construct
  source 1..35: mol_type = other RNA
aaaaaaataaatataaataaataaatataaatata

SEQ ID NO: 7039 - RNA, 35 nt, synthetic construct
  source 1..35: mol_type = other RNA
aaaaaaataaataaatataaataaatataaatata

SEQ ID NO: 7040 - RNA, 35 nt, synthetic construct
  source 1..35: mol_type = other RNA
aaaaaaatataaataaataaataaatataaatata

SEQ ID NO: 7041 - RNA, 35 nt, synthetic construct
  source 1..35: mol_type = other RNA
aaaaaaataaataaataaatataaatataaatata

SEQ ID NO: 7042 - RNA, 35 nt, synthetic construct
  source 1..35: mol_type = other RNA
aaatataaaaaaaaaaaaaaaaaaaaaaaaatata

SEQ ID NO: 7043 - RNA, 35 nt, synthetic construct
  source 1..35: mol_type = other RNA
aaataaataaatatataaataaataaataaataaa

SEQ ID NO: 7044 - RNA, 35 nt, synthetic construct
  source 1..35: mol_type = other RNA
aaataaataaataaataaataaataaatatataaa

SEQ ID NO: 7045 - RNA, 35 nt, synthetic construct
  source 1..35: mol_type = other RNA
aaataaatatataaataaataaataaataaataaa

SEQ ID NO: 7046 - RNA, 35 nt, synthetic construct
  source 1..35: mol_type = other RNA
aaataaataaataaataaataaatatataaataaa

SEQ ID NO: 7047 - RNA, 35 nt, synthetic construct
  source 1..35: mol_type = other RNA
aaataaataaataaatatataaataaataaataaa

SEQ ID NO: 7048 - RNA, 35 nt, synthetic construct
  source 1..35: mol_type = other RNA
aaatatataaataaataaataaataaataaataaa

SEQ ID NO: 7049 - RNA, 35 nt, synthetic construct
  source 1..35: mol_type = other RNA
aaaaaaaaaaaaataaataaataaataaataaata

SEQ ID NO: 7050 - RNA, 35 nt, synthetic construct
  source 1..35: mol_type = other RNA
aaataaatataaaaaaaaaaaaaaaaaaaaatata

SEQ ID NO: 7051 - RNA, 35 nt, synthetic construct
  source 1..35: mol_type = other RNA
aaatataaataaaaaaaaaaaaaaaaaaaaatata

SEQ ID NO: 7052 - RNA, 35 nt, synthetic construct
  source 1..35: mol_type = other RNA
aaataaaaaaaaaaaaaaaaaaaaatataaatata

SEQ ID NO: 7053 - RNA, 35 nt, synthetic construct
  source 1..35: mol_type = other RNA
aaatataaaaaaaaaaaaaaaaaaaaataaatata

SEQ ID NO: 7054 - RNA, 35 nt, synthetic construct
  source 1..35: mol_type = other RNA
aaaaaaaaataaataaataaataaataaataaata

SEQ ID NO: 7055 - RNA, 35 nt, synthetic construct
  source 1..35: mol_type = other RNA
aaataaataaatataaaaaaaaaaaaaaaaatata

SEQ ID NO: 7056 - RNA, 35 nt, synthetic construct
  source 1..35: mol_type = other RNA
aaatataaataaaaaaaaaaaaaaaaataaatata

SEQ ID NO: 7057 - RNA, 35 nt, synthetic construct
  source 1..35: mol_type = other RNA
aaataaataaaaaaaaaaaaaaaaatataaatata

SEQ ID NO: 7058 - RNA, 35 nt, synthetic construct
  source 1..35: mol_type = other RNA
aaataaatataaaaaaaaaaaaaaaaataaatata

SEQ ID NO: 7059 - RNA, 35 nt, synthetic construct
  source 1..35: mol_type = other RNA
aaataaaaaaaaaaaaaaaaatataaataaatata

SEQ ID NO: 7060 - RNA, 35 nt, synthetic construct
  source 1..35: mol_type = other RNA
aaataaatataaataaaaaaaaaaaaaaaaatata

SEQ ID NO: 7061 - RNA, 35 nt, synthetic construct
  source 1..35: mol_type = other RNA
aaatataaataaataaaaaaaaaaaaaaaaatata

SEQ ID NO: 7062 - RNA, 35 nt, synthetic construct
  source 1..35: mol_type = other RNA
aaataaaaaaaaaaaaaaaaataaatataaatata

SEQ ID NO: 7063 - RNA, 35 nt, synthetic construct
  source 1..35: mol_type = other RNA
aaatataaaaaaaaaaaaaaaaataaataaatata

SEQ ID NO: 7064 - RNA, 35 nt, synthetic construct
  source 1..35: mol_type = other RNA
aaaaataaataaataaataaataaataaataaata

SEQ ID NO: 7065 - RNA, 35 nt, synthetic construct
  source 1..35: mol_type = other RNA
aaatataaataaataaaaaaaaaaaaataaatata

SEQ ID NO: 7066 - RNA, 35 nt, synthetic construct
  source 1..35: mol_type = other RNA
aaatataaataaaaaaaaaaaaataaataaatata

SEQ ID NO: 7067 - RNA, 35 nt, synthetic construct
  source 1..35: mol_type = other RNA
aaataaataaataaatataaaaaaaaaaaaatata

SEQ ID NO: 7068 - RNA, 35 nt, synthetic construct
  source 1..35: mol_type = other RNA
aaataaatataaaaaaaaaaaaataaataaatata

SEQ ID NO: 7069 - RNA, 35 nt, synthetic construct
  source 1..35: mol_type = other RNA
aaataaataaatataaataaaaaaaaaaaaatata

SEQ ID NO: 7070 - RNA, 35 nt, synthetic construct
  source 1..35: mol_type = other RNA
aaataaatataaataaataaaaaaaaaaaaatata

SEQ ID NO: 7071 - RNA, 35 nt, synthetic construct
  source 1..35: mol_type = other RNA
aaataaatataaataaaaaaaaaaaaataaatata

SEQ ID NO: 7072 - RNA, 35 nt, synthetic construct
  source 1..35: mol_type = other RNA
aaatataaataaataaataaaaaaaaaaaaatata

SEQ ID NO: 7073 - RNA, 35 nt, synthetic construct
  source 1..35: mol_type = other RNA
aaataaataaatataaaaaaaaaaaaataaatata

SEQ ID NO: 7074 - RNA, 35 nt, synthetic construct
  source 1..35: mol_type = other RNA
aaatataaaaaaaaaaaaataaataaataaatata

SEQ ID NO: 7075 - RNA, 35 nt, synthetic construct
  source 1..35: mol_type = other RNA
aaataaaaaaaaaaaaatataaataaataaatata

SEQ ID NO: 7076 - RNA, 35 nt, synthetic construct
  source 1..35: mol_type = other RNA
aaataaaaaaaaaaaaataaataaatataaatata

SEQ ID NO: 7077 - RNA, 35 nt, synthetic construct
  source 1..35: mol_type = other RNA
aaataaaaaaaaaaaaataaatataaataaatata

SEQ ID NO: 7078 - RNA, 35 nt, synthetic construct
  source 1..35: mol_type = other RNA
aaataaataaaaaaaaaaaaatataaataaatata

SEQ ID NO: 7079 - RNA, 35 nt, synthetic construct
  source 1..35: mol_type = other RNA
aaataaataaataaaaaaaaaaaaatataaatata

SEQ ID NO: 7080 - RNA, 35 nt, synthetic construct
  source 1..35: mol_type = other RNA
aaaaaaaaaaaaaaaaaaaaaaatatataaatata

SEQ ID NO: 7081 - RNA, 35 nt, synthetic construct
  source 1..35: mol_type = other RNA
aaatataaataaataaaaaaaaataaataaatata

SEQ ID NO: 7082 - RNA, 35 nt, synthetic construct
  source 1..35: mol_type = other RNA
aaatataaataaataaataaaaaaaaataaatata

SEQ ID NO: 7083 - RNA, 35 nt, synthetic construct
  source 1..35: mol_type = other RNA
aaataaataaataaatataaataaaaaaaaatata

SEQ ID NO: 7084 - RNA, 35 nt, synthetic construct
  source 1..35: mol_type = other RNA
aaataaataaatataaataaaaaaaaataaatata

SEQ ID NO: 7085 - RNA, 35 nt, synthetic construct
  source 1..35: mol_type = other RNA
aaataaaaaaaaataaataaataaatataaatata

SEQ ID NO: 7086 - RNA, 35 nt, synthetic construct
  source 1..35: mol_type = other RNA
aaataaatataaataaataaataaaaaaaaatata

SEQ ID NO: 7087 - RNA, 35 nt, synthetic construct
  source 1..35: mol_type = other RNA
aaataaatataaataaataaaaaaaaataaatata

SEQ ID NO: 7088 - RNA, 35 nt, synthetic construct
  source 1..35: mol_type = other RNA
aaatataaataaataaataaataaaaaaaaatata

SEQ ID NO: 7089 - RNA, 35 nt, synthetic construct
  source 1..35: mol_type = other RNA
aaataaaaaaaaatataaataaataaataaatata

SEQ ID NO: 7090 - RNA, 35 nt, synthetic construct
  source 1..35: mol_type = other RNA
aaataaaaaaaaataaatataaataaataaatata

SEQ ID NO: 7091 - RNA, 35 nt, synthetic construct
  source 1..35: mol_type = other RNA
aaataaatataaaaaaaaataaataaataaatata

SEQ ID NO: 7092 - RNA, 35 nt, synthetic construct
  source 1..35: mol_type = other RNA
aaataaataaatataaataaataaaaaaaaatata

SEQ ID NO: 7093 - RNA, 35 nt, synthetic construct
  source 1..35: mol_type = other RNA
aaataaaaaaaaataaataaatataaataaatata

SEQ ID NO: 7094 - RNA, 35 nt, synthetic construct
  source 1..35: mol_type = other RNA
aaaaaaaaaaaaaaaaaaaaaaatataaatatata

SEQ ID NO: 7095 - RNA, 35 nt, synthetic construct
  source 1..35: mol_type = other RNA
aaatataaataaaaaaaaataaataaataaatata

SEQ ID NO: 7096 - RNA, 35 nt, synthetic construct
  source 1..35: mol_type = other RNA
aaataaataaatataaaaaaaaataaataaatata

SEQ ID NO: 7097 - RNA, 35 nt, synthetic construct
  source 1..35: mol_type = other RNA
aaataaataaaaaaaaataaataaatataaatata

SEQ ID NO: 7098 - RNA, 35 nt, synthetic construct
  source 1..35: mol_type = other RNA
aaataaataaaaaaaaatataaataaataaatata

SEQ ID NO: 7099 - RNA, 35 nt, synthetic construct
  source 1..35: mol_type = other RNA
aaataaataaataaatataaaaaaaaataaatata

SEQ ID NO: 7100 - RNA, 35 nt, synthetic construct
  source 1..35: mol_type = other RNA
aaataaataaaaaaaaataaatataaataaatata

SEQ ID NO: 7101 - RNA, 35 nt, synthetic construct
  source 1..35: mol_type = other RNA
aaataaatataaataaaaaaaaataaataaatata

SEQ ID NO: 7102 - RNA, 35 nt, synthetic construct
  source 1..35: mol_type = other RNA
aaataaataaataaaaaaaaatataaataaatata

SEQ ID NO: 7103 - RNA, 35 nt, synthetic construct
  source 1..35: mol_type = other RNA
aaataaataaataaataaaaaaaaatataaatata

SEQ ID NO: 7104 - RNA, 35 nt, synthetic construct
  source 1..35: mol_type = other RNA
aaatataaaaaaaaataaataaataaataaatata

SEQ ID NO: 7105 - RNA, 35 nt, synthetic construct
  source 1..35: mol_type = other RNA
aaataaataaataaataaatataaaaaaaaatata

SEQ ID NO: 7106 - RNA, 36 nt, synthetic construct
  source 1..36: mol_type = other RNA
aaaaaaaaaaaaaaaaaaaaaaaaaaaaaaaatata

SEQ ID NO: 7107 - RNA, 36 nt, synthetic construct
  source 1..36: mol_type = other RNA
aaaaaaaaaaaaaaaaaaaaaaaaaaaataaatata

SEQ ID NO: 7108 - RNA, 36 nt, synthetic construct
  source 1..36: mol_type = other RNA
aaaaaaaaaaaaaaaaaaaaaaaataaataaatata

SEQ ID NO: 7109 - RNA, 36 nt, synthetic construct
  source 1..36: mol_type = other RNA
aaaaaaaaaaaaaaaaaaaataaataaataaatata

SEQ ID NO: 7110 - RNA, 36 nt, synthetic construct
  source 1..36: mol_type = other RNA
aaaaaaaaaaaaaaaataaataaataaataaatata

SEQ ID NO: 7111 - RNA, 36 nt, synthetic construct
  source 1..36: mol_type = other RNA
aaaaaaaaaaaataaataaataaataaataaatata

SEQ ID NO: 7112 - RNA, 36 nt, synthetic construct
  source 1..36: mol_type = other RNA
aaaaaaaataaataaataaataaataaataaatata

SEQ ID NO: 7113 - RNA, 36 nt, synthetic construct
  source 1..36: mol_type = other RNA
aaaataaataaataaataaataaataaataaatata

SEQ ID NO: 7114 - RNA, 36 nt, synthetic construct
  source 1..36: mol_type = other RNA
aaataaataaataaatataaataaataaataaataa

SEQ ID NO: 7115 - RNA, 36 nt, synthetic construct
  source 1..36: mol_type = other RNA
aaataaataaataaataaatataaataaataaataa

SEQ ID NO: 7116 - RNA, 36 nt, synthetic construct
  source 1..36: mol_type = other RNA
aaataaataaatataaataaataaataaataaataa

SEQ ID NO: 7117 - RNA, 36 nt, synthetic construct
  source 1..36: mol_type = other RNA
aaataaatataaataaataaataaataaataaataa

SEQ ID NO: 7118 - RNA, 36 nt, synthetic construct
  source 1..36: mol_type = other RNA
aaatataaataaataaataaataaataaataaataa

SEQ ID NO: 7119 - RNA, 36 nt, synthetic construct
  source 1..36: mol_type = other RNA
aaaaaaaaaaaaaaaaaaaaaaaaaatataaatata

SEQ ID NO: 7120 - RNA, 36 nt, synthetic construct
  source 1..36: mol_type = other RNA
aaaaaaaaaaaaaaaaaaaaaataaatataaatata

SEQ ID NO: 7121 - RNA, 36 nt, synthetic construct
  source 1..36: mol_type = other RNA
aaaaaaaaaaaaaaaaaaaaaatataaataaatata

SEQ ID NO: 7122 - RNA, 36 nt, synthetic construct
  source 1..36: mol_type = other RNA
aaaaaaaaaaaaaaaaaataaatataaataaatata

SEQ ID NO: 7123 - RNA, 36 nt, synthetic construct
  source 1..36: mol_type = other RNA
aaaaaaaaaaaaaaaaaataaataaatataaatata

SEQ ID NO: 7124 - RNA, 36 nt, synthetic construct
  source 1..36: mol_type = other RNA
aaaaaaaaaaaaaaaaaatataaataaataaatata

SEQ ID NO: 7125 - RNA, 36 nt, synthetic construct
  source 1..36: mol_type = other RNA
aaaaaaaaaaaaaataaataaataaatataaatata

SEQ ID NO: 7126 - RNA, 36 nt, synthetic construct
  source 1..36: mol_type = other RNA
aaaaaaaaaaaaaataaataaatataaataaatata

SEQ ID NO: 7127 - RNA, 36 nt, synthetic construct
  source 1..36: mol_type = other RNA
aaaaaaaaaaaaaataaatataaataaataaatata

SEQ ID NO: 7128 - RNA, 36 nt, synthetic construct
  source 1..36: mol_type = other RNA
aaaaaaaaaaaaaatataaataaataaataaatata

SEQ ID NO: 7129 - RNA, 36 nt, synthetic construct
  source 1..36: mol_type = other RNA
aaataaataaatataaataaataaataaataaatat

SEQ ID NO: 7130 - RNA, 36 nt, synthetic construct
  source 1..36: mol_type = other RNA
aaataaatataaataaataaataaataaataaatat

SEQ ID NO: 7131 - RNA, 36 nt, synthetic construct
  source 1..36: mol_type = other RNA
aaataaataaataaatataaataaataaataaatat

SEQ ID NO: 7132 - RNA, 36 nt, synthetic construct
  source 1..36: mol_type = other RNA
aaataaataaataaataaatataaataaataaatat

SEQ ID NO: 7133 - RNA, 36 nt, synthetic construct
  source 1..36: mol_type = other RNA
aaatataaataaataaataaataaataaataaatat

SEQ ID NO: 7134 - RNA, 36 nt, synthetic construct
  source 1..36: mol_type = other RNA
aaaaaaaaaataaataaataaatataaataaatata

SEQ ID NO: 7135 - RNA, 36 nt, synthetic construct
  source 1..36: mol_type = other RNA
aaaaaaaaaataaataaataaataaatataaatata

SEQ ID NO: 7136 - RNA, 36 nt, synthetic construct
  source 1..36: mol_type = other RNA
aaaaaaaaaataaataaatataaataaataaatata

SEQ ID NO: 7137 - RNA, 36 nt, synthetic construct
  source 1..36: mol_type = other RNA
aaaaaaaaaatataaataaataaataaataaatata

SEQ ID NO: 7138 - RNA, 36 nt, synthetic construct
  source 1..36: mol_type = other RNA
aaaaaaaaaataaatataaataaataaataaatata

SEQ ID NO: 7139 - RNA, 36 nt, synthetic construct
  source 1..36: mol_type = other RNA
aaataaaaaaaaaaaaaaaaaaaaaaaaaaaatata

SEQ ID NO: 7140 - RNA, 36 nt, synthetic construct
  source 1..36: mol_type = other RNA
aaaaaataaataaataaataaataaatataaatata

SEQ ID NO: 7141 - RNA, 36 nt, synthetic construct
  source 1..36: mol_type = other RNA
aaaaaataaataaataaatataaataaataaatata

SEQ ID NO: 7142 - RNA, 36 nt, synthetic construct
  source 1..36: mol_type = other RNA
aaaaaataaatataaataaataaataaataaatata

SEQ ID NO: 7143 - RNA, 36 nt, synthetic construct
  source 1..36: mol_type = other RNA
aaaaaataaataaatataaataaataaataaatata

SEQ ID NO: 7144 - RNA, 36 nt, synthetic construct
  source 1..36: mol_type = other RNA
aaaaaatataaataaataaataaataaataaatata

SEQ ID NO: 7145 - RNA, 36 nt, synthetic construct
  source 1..36: mol_type = other RNA
aaaaaataaataaataaataaatataaataaatata

SEQ ID NO: 7146 - RNA, 36 nt, synthetic construct
  source 1..36: mol_type = other RNA
aaataaaaaaaaaaaaaaaaaaaaaaaataaatata

SEQ ID NO: 7147 - RNA, 36 nt, synthetic construct
  source 1..36: mol_type = other RNA
aaataaataaaaaaaaaaaaaaaaaaaaaaaatata

SEQ ID NO: 7148 - RNA, 36 nt, synthetic construct
  source 1..36: mol_type = other RNA
aaataaaaaaaaaaaaaaaaaaaataaataaatata

SEQ ID NO: 7149 - RNA, 36 nt, synthetic construct
  source 1..36: mol_type = other RNA
aaataaataaaaaaaaaaaaaaaaaaaataaatata

SEQ ID NO: 7150 - RNA, 36 nt, synthetic construct
  source 1..36: mol_type = other RNA
aaataaataaataaaaaaaaaaaaaaaaaaaatata

SEQ ID NO: 7151 - RNA, 36 nt, synthetic construct
  source 1..36: mol_type = other RNA
aaataaataaataaaaaaaaaaaaaaaataaatata

SEQ ID NO: 7152 - RNA, 36 nt, synthetic construct
  source 1..36: mol_type = other RNA
aaataaataaaaaaaaaaaaaaaataaataaatata

SEQ ID NO: 7153 - RNA, 36 nt, synthetic construct
  source 1..36: mol_type = other RNA
aaataaataaataaataaaaaaaaaaaaaaaatata

SEQ ID NO: 7154 - RNA, 36 nt, synthetic construct
  source 1..36: mol_type = other RNA
aaataaaaaaaaaaaaaaaataaataaataaatata

SEQ ID NO: 7155 - RNA, 36 nt, synthetic construct
  source 1..36: mol_type = other RNA
aaaaaaaaaaaaaaaaaaaaaaaaaaaaaatatata

SEQ ID NO: 7156 - RNA, 36 nt, synthetic construct
  source 1..36: mol_type = other RNA
aaataaataaataaaaaaaaaaaataaataaatata

SEQ ID NO: 7157 - RNA, 36 nt, synthetic construct
  source 1..36: mol_type = other RNA
aaataaataaaaaaaaaaaataaataaataaatata

SEQ ID NO: 7158 - RNA, 36 nt, synthetic construct
  source 1..36: mol_type = other RNA
aaataaaaaaaaaaaataaataaataaataaatata

SEQ ID NO: 7159 - RNA, 36 nt, synthetic construct
  source 1..36: mol_type = other RNA
aaataaataaataaataaataaaaaaaaaaaatata

SEQ ID NO: 7160 - RNA, 36 nt, synthetic construct
  source 1..36: mol_type = other RNA
aaaaaaaaaaaaaaaaaaaaaaaaaataaatatata

SEQ ID NO: 7161 - RNA, 36 nt, synthetic construct
  source 1..36: mol_type = other RNA
aaaaaaaaaaaaaaaaaaaaaaaaaaaaaaaaataa

SEQ ID NO: 7162 - RNA, 36 nt, synthetic construct
  source 1..36: mol_type = other RNA
aaataaataaaaaaaataaataaataaataaatata

SEQ ID NO: 7163 - RNA, 36 nt, synthetic construct
  source 1..36: mol_type = other RNA
aaataaataaataaaaaaaataaataaataaatata

SEQ ID NO: 7164 - RNA, 36 nt, synthetic construct
  source 1..36: mol_type = other RNA
aaataaataaataaataaataaataaaaaaaatata

SEQ ID NO: 7165 - RNA, 36 nt, synthetic construct
  source 1..36: mol_type = other RNA
aaataaaaaaaataaataaataaataaataaatata

SEQ ID NO: 7166 - RNA, 36 nt, synthetic construct
  source 1..36: mol_type = other RNA
aaaaaaaaaaaaaaaaaaaaaataaataaatatata

SEQ ID NO: 7167 - RNA, 36 nt, synthetic construct
  source 1..36: mol_type = other RNA
aaaaaaaaaaaaaaaaaaaaaaaaaaaaataaataa

SEQ ID NO: 7168 - RNA, 36 nt, synthetic construct
  source 1..36: mol_type = other RNA
aaataaataaataaaataaataaataaataaatata

SEQ ID NO: 7169 - RNA, 36 nt, synthetic construct
  source 1..36: mol_type = other RNA
aaataaataaaataaataaataaataaataaatata

SEQ ID NO: 7170 - RNA, 36 nt, synthetic construct
  source 1..36: mol_type = other RNA
aaataaaataaataaataaataaataaataaatata

SEQ ID NO: 7171 - RNA, 36 nt, synthetic construct
  source 1..36: mol_type = other RNA
aaaaaaaaaaaaaaaaaataaataaataaatatata

SEQ ID NO: 7172 - RNA, 36 nt, synthetic construct
  source 1..36: mol_type = other RNA
aaaaaaaaaaaaaaaaaaaaaaaaataaataaataa

SEQ ID NO: 7173 - RNA, 36 nt, synthetic construct
  source 1..36: mol_type = other RNA
aaaaaaaaaaaaaataaataaataaataaatatata

SEQ ID NO: 7174 - RNA, 36 nt, synthetic construct
  source 1..36: mol_type = other RNA
aaaaaaaaaaaaaaaaaaaaaaaaaaaaaaaataaa

SEQ ID NO: 7175 - RNA, 36 nt, synthetic construct
  source 1..36: mol_type = other RNA
aaaaaaaaaaaaaaaaaaaaataaataaataaataa

SEQ ID NO: 7176 - RNA, 36 nt, synthetic construct
  source 1..36: mol_type = other RNA
aaaaaaaaaataaataaataaataaataaatatata

SEQ ID NO: 7177 - RNA, 36 nt, synthetic construct
  source 1..36: mol_type = other RNA
aaaaaaaaaaaaaaaaaaaaaaaaaaaataaataaa

SEQ ID NO: 7178 - RNA, 36 nt, synthetic construct
  source 1..36: mol_type = other RNA
aaaaaaaaaaaaaaaaataaataaataaataaataa

SEQ ID NO: 7179 - RNA, 36 nt, synthetic construct
  source 1..36: mol_type = other RNA
aaaaaataaataaataaataaataaataaatatata

SEQ ID NO: 7180 - RNA, 36 nt, synthetic construct
  source 1..36: mol_type = other RNA
aaaaaaaaaaaaaaaaaaaaaaaataaataaataaa

SEQ ID NO: 7181 - RNA, 36 nt, synthetic construct
  source 1..36: mol_type = other RNA
aaaaaaaaaaaaataaataaataaataaataaataa

SEQ ID NO: 7182 - RNA, 36 nt, synthetic construct
  source 1..36: mol_type = other RNA
aaaaaaaaaaaaaaaaaaaataaataaataaataaa

SEQ ID NO: 7183 - RNA, 36 nt, synthetic construct
  source 1..36: mol_type = other RNA
aaaaaaaaataaataaataaataaataaataaataa

SEQ ID NO: 7184 - RNA, 36 nt, synthetic construct
  source 1..36: mol_type = other RNA
aaaaaaaaaaaaaaaataaataaataaataaataaa

SEQ ID NO: 7185 - RNA, 36 nt, synthetic construct
  source 1..36: mol_type = other RNA
aaaaataaataaataaataaataaataaataaataa

SEQ ID NO: 7186 - RNA, 36 nt, synthetic construct
  source 1..36: mol_type = other RNA
aaaaaaaaaaaataaataaataaataaataaataaa

SEQ ID NO: 7187 - RNA, 36 nt, synthetic construct
  source 1..36: mol_type = other RNA
aaaaaaaataaataaataaataaataaataaataaa

SEQ ID NO: 7188 - RNA, 36 nt, synthetic construct
  source 1..36: mol_type = other RNA
aaaaaaaaaaaaaaaaaaaaaaaaaaaaaaaaatat

SEQ ID NO: 7189 - RNA, 36 nt, synthetic construct
  source 1..36: mol_type = other RNA
aaaataaataaataaataaataaataaataaataaa

SEQ ID NO: 7190 - RNA, 36 nt, synthetic construct
  source 1..36: mol_type = other RNA
aaaaaaaaaaaaaaaaaaaaaaaaaaaaataaatat

SEQ ID NO: 7191 - RNA, 36 nt, synthetic construct
  source 1..36: mol_type = other RNA
aaaaaaaaaaaaaaaaaaaaaaaaataaataaatat

SEQ ID NO: 7192 - RNA, 36 nt, synthetic construct
  source 1..36: mol_type = other RNA
aaaaaaaaaaaaaaaaaaaaataaataaataaatat

SEQ ID NO: 7193 - RNA, 36 nt, synthetic construct
  source 1..36: mol_type = other RNA
aaaaaaaaaaaaaaaaataaataaataaataaatat

SEQ ID NO: 7194 - RNA, 36 nt, synthetic construct
  source 1..36: mol_type = other RNA
taaataaataaataaataaataaataaataaatata

SEQ ID NO: 7195 - RNA, 36 nt, synthetic construct
  source 1..36: mol_type = other RNA
aaaaaaaaaaaaataaataaataaataaataaatat

SEQ ID NO: 7196 - RNA, 36 nt, synthetic construct
  source 1..36: mol_type = other RNA
aaaaaaaaataaataaataaataaataaataaatat

SEQ ID NO: 7197 - RNA, 36 nt, synthetic construct
  source 1..36: mol_type = other RNA
aaaaataaataaataaataaataaataaataaatat

SEQ ID NO: 7198 - RNA, 36 nt, synthetic construct
  source 1..36: mol_type = other RNA
aaaaaaaaaaaaaaaaaaaaaaaaaaaaaaaaaata

SEQ ID NO: 7199 - RNA, 36 nt, synthetic construct
  source 1..36: mol_type = other RNA
aataaataaataaataaataaataaatataaatata

SEQ ID NO: 7200 - RNA, 36 nt, synthetic construct
  source 1..36: mol_type = other RNA
aataaataaataaataaataaatataaataaatata

SEQ ID NO: 7201 - RNA, 36 nt, synthetic construct
  source 1..36: mol_type = other RNA
aataaataaataaatataaataaataaataaatata

SEQ ID NO: 7202 - RNA, 36 nt, synthetic construct
  source 1..36: mol_type = other RNA
aataaataaatataaataaataaataaataaatata

SEQ ID NO: 7203 - RNA, 36 nt, synthetic construct
  source 1..36: mol_type = other RNA
aaaaaaaaaaaaaaaaaaaaaaaaaaaaaataaata

SEQ ID NO: 7204 - RNA, 36 nt, synthetic construct
  source 1..36: mol_type = other RNA
aaaaaaaaaaaaaaaaaaaatataaatataaatata

SEQ ID NO: 7205 - RNA, 36 nt, synthetic construct
  source 1..36: mol_type = other RNA
aaaaaaaaaaaaaaaaaaaaaaaaaataaataaata

SEQ ID NO: 7206 - RNA, 36 nt, synthetic construct
  source 1..36: mol_type = other RNA
aaaaaaaaaaaaaaaataaatataaatataaatata

SEQ ID NO: 7207 - RNA, 36 nt, synthetic construct
  source 1..36: mol_type = other RNA
aaaaaaaaaaaaaaaatataaatataaataaatata

SEQ ID NO: 7208 - RNA, 36 nt, synthetic construct
  source 1..36: mol_type = other RNA
aaaaaaaaaaaaaaaatataaataaatataaatata

SEQ ID NO: 7209 - RNA, 36 nt, synthetic construct
  source 1..36: mol_type = other RNA
aaaaaaaaaaaaaaaaaaaaaataaataaataaata

SEQ ID NO: 7210 - RNA, 36 nt, synthetic construct
  source 1..36: mol_type = other RNA
aaaaaaaaaaaataaataaatataaatataaatata

SEQ ID NO: 7211 - RNA, 36 nt, synthetic construct
  source 1..36: mol_type = other RNA
aaaaaaaaaaaatataaataaatataaataaatata

SEQ ID NO: 7212 - RNA, 36 nt, synthetic construct
  source 1..36: mol_type = other RNA
aaaaaaaaaaaatataaataaataaatataaatata

SEQ ID NO: 7213 - RNA, 36 nt, synthetic construct
  source 1..36: mol_type = other RNA
aaaaaaaaaaaataaatataaataaatataaatata

SEQ ID NO: 7214 - RNA, 36 nt, synthetic construct
  source 1..36: mol_type = other RNA
aaaaaaaaaaaataaatataaatataaataaatata

SEQ ID NO: 7215 - RNA, 36 nt, synthetic construct
  source 1..36: mol_type = other RNA
aaaaaaaaaaaatataaatataaataaataaatata

SEQ ID NO: 7216 - RNA, 36 nt, synthetic construct
  source 1..36: mol_type = other RNA
aaaaaaaaaaaaaaaaaataaataaataaataaata

SEQ ID NO: 7217 - RNA, 36 nt, synthetic construct
  source 1..36: mol_type = other RNA
aaaaaaaataaataaataaatataaatataaatata

SEQ ID NO: 7218 - RNA, 36 nt, synthetic construct
  source 1..36: mol_type = other RNA
aaaaaaaatataaataaataaataaatataaatata

SEQ ID NO: 7219 - RNA, 36 nt, synthetic construct
  source 1..36: mol_type = other RNA
aaaaaaaatataaataaataaatataaataaatata

SEQ ID NO: 7220 - RNA, 36 nt, synthetic construct
  source 1..36: mol_type = other RNA
aaaaaaaataaatataaataaataaatataaatata

SEQ ID NO: 7221 - RNA, 36 nt, synthetic construct
  source 1..36: mol_type = other RNA
aaaaaaaataaatataaataaatataaataaatata

SEQ ID NO: 7222 - RNA, 36 nt, synthetic construct
  source 1..36: mol_type = other RNA
aaaaaaaataaatataaatataaataaataaatata

SEQ ID NO: 7223 - RNA, 36 nt, synthetic construct
  source 1..36: mol_type = other RNA
aaaaaaaataaataaatataaataaatataaatata

SEQ ID NO: 7224 - RNA, 36 nt, synthetic construct
  source 1..36: mol_type = other RNA
aaaaaaaataaataaatataaatataaataaatata

SEQ ID NO: 7225 - RNA, 36 nt, synthetic construct
  source 1..36: mol_type = other RNA
aaatataaaaaaaaaaaaaaaaaaaaaaaaaatata

SEQ ID NO: 7226 - RNA, 36 nt, synthetic construct
  source 1..36: mol_type = other RNA
aaaaaaaaaaaaaataaataaataaataaataaata

SEQ ID NO: 7227 - RNA, 36 nt, synthetic construct
  source 1..36: mol_type = other RNA
aaaataaataaataaataaatataaatataaatata

SEQ ID NO: 7228 - RNA, 36 nt, synthetic construct
  source 1..36: mol_type = other RNA
aaaataaataaatataaataaataaatataaatata

SEQ ID NO: 7229 - RNA, 36 nt, synthetic construct
  source 1..36: mol_type = other RNA
aaaataaatataaataaataaataaatataaatata

SEQ ID NO: 7230 - RNA, 36 nt, synthetic construct
  source 1..36: mol_type = other RNA
aaaataaatataaataaataaatataaataaatata

SEQ ID NO: 7231 - RNA, 36 nt, synthetic construct
  source 1..36: mol_type = other RNA
aaaataaataaatataaataaatataaataaatata

SEQ ID NO: 7232 - RNA, 36 nt, synthetic construct
  source 1..36: mol_type = other RNA
aaaatataaataaataaatataaataaataaatata

SEQ ID NO: 7233 - RNA, 36 nt, synthetic construct
  source 1..36: mol_type = other RNA
aaaatataaataaataaataaataaatataaatata

SEQ ID NO: 7234 - RNA, 36 nt, synthetic construct
  source 1..36: mol_type = other RNA
aaaatataaataaataaataaatataaataaatata

SEQ ID NO: 7235 - RNA, 36 nt, synthetic construct
  source 1..36: mol_type = other RNA
aaaataaataaataaatataaataaatataaatata

SEQ ID NO: 7236 - RNA, 36 nt, synthetic construct
  source 1..36: mol_type = other RNA
aaatataaaaaaaaaaaaaaaaaaaaaataaatata

SEQ ID NO: 7237 - RNA, 36 nt, synthetic construct
  source 1..36: mol_type = other RNA
aaataaatataaaaaaaaaaaaaaaaaaaaaatata

SEQ ID NO: 7238 - RNA, 36 nt, synthetic construct
  source 1..36: mol_type = other RNA
aaatataaataaaaaaaaaaaaaaaaaaaaaatata

SEQ ID NO: 7239 - RNA, 36 nt, synthetic construct
  source 1..36: mol_type = other RNA
aaataaaaaaaaaaaaaaaaaaaaaatataaatata

SEQ ID NO: 7240 - RNA, 36 nt, synthetic construct
  source 1..36: mol_type = other RNA
aaaaaaaaaataaataaataaataaataaataaata

SEQ ID NO: 7241 - RNA, 36 nt, synthetic construct
  source 1..36: mol_type = other RNA
aaataaaaaaaaaaaaaaaaaatataaataaatata

SEQ ID NO: 7242 - RNA, 36 nt, synthetic construct
  source 1..36: mol_type = other RNA
aaatataaataaaaaaaaaaaaaaaaaataaatata

SEQ ID NO: 7243 - RNA, 36 nt, synthetic construct
  source 1..36: mol_type = other RNA
aaatataaaaaaaaaaaaaaaaaataaataaatata

SEQ ID NO: 7244 - RNA, 36 nt, synthetic construct
  source 1..36: mol_type = other RNA
aaataaatataaataaaaaaaaaaaaaaaaaatata

SEQ ID NO: 7245 - RNA, 36 nt, synthetic construct
  source 1..36: mol_type = other RNA
aaataaataaatataaaaaaaaaaaaaaaaaatata

SEQ ID NO: 7246 - RNA, 36 nt, synthetic construct
  source 1..36: mol_type = other RNA
aaataaatataaaaaaaaaaaaaaaaaataaatata

SEQ ID NO: 7247 - RNA, 36 nt, synthetic construct
  source 1..36: mol_type = other RNA
aaataaataaaaaaaaaaaaaaaaaatataaatata

SEQ ID NO: 7248 - RNA, 36 nt, synthetic construct
  source 1..36: mol_type = other RNA
aaatataaataaataaaaaaaaaaaaaaaaaatata

SEQ ID NO: 7249 - RNA, 36 nt, synthetic construct
  source 1..36: mol_type = other RNA
aaataaaaaaaaaaaaaaaaaataaatataaatata

SEQ ID NO: 7250 - RNA, 36 nt, synthetic construct
  source 1..36: mol_type = other RNA
aaaaaataaataaataaataaataaataaataaata

SEQ ID NO: 7251 - RNA, 36 nt, synthetic construct
  source 1..36: mol_type = other RNA
aaataaaaaaaaaaaaaataaatataaataaatata

SEQ ID NO: 7252 - RNA, 36 nt, synthetic construct
  source 1..36: mol_type = other RNA
aaatataaataaataaaaaaaaaaaaaataaatata

SEQ ID NO: 7253 - RNA, 36 nt, synthetic construct
  source 1..36: mol_type = other RNA
aaataaaaaaaaaaaaaataaataaatataaatata

SEQ ID NO: 7254 - RNA, 36 nt, synthetic construct
  source 1..36: mol_type = other RNA
aaataaatataaataaaaaaaaaaaaaataaatata

SEQ ID NO: 7255 - RNA, 36 nt, synthetic construct
  source 1..36: mol_type = other RNA
aaataaataaatataaaaaaaaaaaaaataaatata

SEQ ID NO: 7256 - RNA, 36 nt, synthetic construct
  source 1..36: mol_type = other RNA
aaatataaataaataaataaaaaaaaaaaaaatata

SEQ ID NO: 7257 - RNA, 36 nt, synthetic construct
  source 1..36: mol_type = other RNA
aaataaataaataaatataaaaaaaaaaaaaatata

SEQ ID NO: 7258 - RNA, 36 nt, synthetic construct
  source 1..36: mol_type = other RNA
aaataaataaatataaataaaaaaaaaaaaaatata

SEQ ID NO: 7259 - RNA, 36 nt, synthetic construct
  source 1..36: mol_type = other RNA
aaatataaataaaaaaaaaaaaaataaataaatata

SEQ ID NO: 7260 - RNA, 36 nt, synthetic construct
  source 1..36: mol_type = other RNA
aaataaaaaaaaaaaaaatataaataaataaatata

SEQ ID NO: 7261 - RNA, 36 nt, synthetic construct
  source 1..36: mol_type = other RNA
aaataaataaaaaaaaaaaaaataaatataaatata

SEQ ID NO: 7262 - RNA, 36 nt, synthetic construct
  source 1..36: mol_type = other RNA
aaataaatataaataaataaaaaaaaaaaaaatata

SEQ ID NO: 7263 - RNA, 36 nt, synthetic construct
  source 1..36: mol_type = other RNA
aaataaataaaaaaaaaaaaaatataaataaatata

SEQ ID NO: 7264 - RNA, 36 nt, synthetic construct
  source 1..36: mol_type = other RNA
aaataaataaataaataaatataaaaaaaaaatata

SEQ ID NO: 7265 - RNA, 36 nt, synthetic construct
  source 1..36: mol_type = other RNA
aaataaataaataaataaaaaaaaaatataaatata

SEQ ID NO: 7266 - RNA, 36 nt, synthetic construct
  source 1..36: mol_type = other RNA
aaataaaaaaaaaataaataaatataaataaatata

SEQ ID NO: 7267 - RNA, 36 nt, synthetic construct
  source 1..36: mol_type = other RNA
aaataaataaaaaaaaaataaatataaataaatata

SEQ ID NO: 7268 - RNA, 36 nt, synthetic construct
  source 1..36: mol_type = other RNA
aaataaatataaataaaaaaaaaataaataaatata

SEQ ID NO: 7269 - RNA, 36 nt, synthetic construct
  source 1..36: mol_type = other RNA
aaataaataaatataaaaaaaaaataaataaatata

SEQ ID NO: 7270 - RNA, 36 nt, synthetic construct
  source 1..36: mol_type = other RNA
aaatataaataaataaataaataaaaaaaaaatata

SEQ ID NO: 7271 - RNA, 36 nt, synthetic construct
  source 1..36: mol_type = other RNA
aaatataaataaataaataaaaaaaaaataaatata

SEQ ID NO: 7272 - RNA, 36 nt, synthetic construct
  source 1..36: mol_type = other RNA
aaataaataaatataaataaataaaaaaaaaatata

SEQ ID NO: 7273 - RNA, 36 nt, synthetic construct
  source 1..36: mol_type = other RNA
aaataaataaataaatataaataaaaaaaaaatata

SEQ ID NO: 7274 - RNA, 36 nt, synthetic construct
  source 1..36: mol_type = other RNA
aaataaatataaataaataaataaaaaaaaaatata

SEQ ID NO: 7275 - RNA, 36 nt, synthetic construct
  source 1..36: mol_type = other RNA
aaataaataaataaaaaaaaaatataaataaatata

SEQ ID NO: 7276 - RNA, 36 nt, synthetic construct
  source 1..36: mol_type = other RNA
aaataaatataaataaataaaaaaaaaataaatata

SEQ ID NO: 7277 - RNA, 36 nt, synthetic construct
  source 1..36: mol_type = other RNA
aaatataaataaataaaaaaaaaataaataaatata

SEQ ID NO: 7278 - RNA, 36 nt, synthetic construct
  source 1..36: mol_type = other RNA
aaataaataaaaaaaaaatataaataaataaatata

SEQ ID NO: 7279 - RNA, 36 nt, synthetic construct
  source 1..36: mol_type = other RNA
aaataaataaaaaaaaaataaataaatataaatata

SEQ ID NO: 7280 - RNA, 36 nt, synthetic construct
  source 1..36: mol_type = other RNA
aaataaaaaaaaaataaataaataaatataaatata

SEQ ID NO: 7281 - RNA, 36 nt, synthetic construct
  source 1..36: mol_type = other RNA
aaatataaaaaaaaaataaataaataaataaatata

SEQ ID NO: 7282 - RNA, 36 nt, synthetic construct
  source 1..36: mol_type = other RNA
aaaaaaaaaaaaaaaaaaaaaaaatataaatatata

SEQ ID NO: 7283 - RNA, 36 nt, synthetic construct
  source 1..36: mol_type = other RNA
aaaaaaaaaaaaaaaaaaaaaaaatatataaatata

SEQ ID NO: 7284 - RNA, 36 nt, synthetic construct
  source 1..36: mol_type = other RNA
aataaataaataaataaataaataaataaatatata

SEQ ID NO: 7285 - RNA, 36 nt, synthetic construct
  source 1..36: mol_type = other RNA
aaaaaaaaaaaaaaaaaaaaaaaaaaaaaaatataa

SEQ ID NO: 7286 - RNA, 36 nt, synthetic construct
  source 1..36: mol_type = other RNA
aaaaaaaaaaaaaaaaaaaataaatatataaatata

SEQ ID NO: 7287 - RNA, 36 nt, synthetic construct
  source 1..36: mol_type = other RNA
aaaaaaaaaaaaaaaaaaaataaatataaatatata

SEQ ID NO: 7288 - RNA, 36 nt, synthetic construct
  source 1..36: mol_type = other RNA
aaaaaaaaaaaaaaaaaaaatatataaataaatata

SEQ ID NO: 7289 - RNA, 36 nt, synthetic construct
  source 1..36: mol_type = other RNA
aaataaataaataaataaatataaataaaaaatata

SEQ ID NO: 7290 - RNA, 36 nt, synthetic construct
  source 1..36: mol_type = other RNA
aaataaatataaataaataaataaataaaaaatata

SEQ ID NO: 7291 - RNA, 36 nt, synthetic construct
  source 1..36: mol_type = other RNA
aaataaataaatataaataaataaataaaaaatata

SEQ ID NO: 7292 - RNA, 36 nt, synthetic construct
  source 1..36: mol_type = other RNA
aaataaataaataaatataaataaataaaaaatata

SEQ ID NO: 7293 - RNA, 36 nt, synthetic construct
  source 1..36: mol_type = other RNA
aaataaaaaataaataaataaatataaataaatata

SEQ ID NO: 7294 - RNA, 36 nt, synthetic construct
  source 1..36: mol_type = other RNA
aaataaaaaataaataaataaataaatataaatata

SEQ ID NO: 7295 - RNA, 36 nt, synthetic construct
  source 1..36: mol_type = other RNA
aaatataaataaataaataaataaataaaaaatata

SEQ ID NO: 7296 - RNA, 36 nt, synthetic construct
  source 1..36: mol_type = other RNA
aaatataaataaataaataaataaaaaataaatata

SEQ ID NO: 7297 - RNA, 36 nt, synthetic construct
  source 1..36: mol_type = other RNA
aaataaataaataaaaaataaatataaataaatata

SEQ ID NO: 7298 - RNA, 36 nt, synthetic construct
  source 1..36: mol_type = other RNA
aaaaaaaaaaaaaaaaaaaatataaataaatatata

SEQ ID NO: 7299 - RNA, 36 nt, synthetic construct
  source 1..36: mol_type = other RNA
aaataaataaataaataaatataaaaaataaatata

SEQ ID NO: 7300 - RNA, 36 nt, synthetic construct
  source 1..36: mol_type = other RNA
aaataaataaaaaataaataaataaatataaatata

SEQ ID NO: 7301 - RNA, 36 nt, synthetic construct
  source 1..36: mol_type = other RNA
aaataaataaaaaatataaataaataaataaatata

SEQ ID NO: 7302 - RNA, 36 nt, synthetic construct
  source 1..36: mol_type = other RNA
aaataaatataaaaaataaataaataaataaatata

SEQ ID NO: 7303 - RNA, 36 nt, synthetic construct
  source 1..36: mol_type = other RNA
aaatataaataaaaaataaataaataaataaatata

SEQ ID NO: 7304 - RNA, 36 nt, synthetic construct
  source 1..36: mol_type = other RNA
aaataaataaataaataaataaaaaatataaatata

SEQ ID NO: 7305 - RNA, 36 nt, synthetic construct
  source 1..36: mol_type = other RNA
aaataaaaaataaatataaataaataaataaatata

SEQ ID NO: 7306 - RNA, 36 nt, synthetic construct
  source 1..36: mol_type = other RNA
aaataaaaaatataaataaataaataaataaatata

SEQ ID NO: 7307 - RNA, 37 nt, synthetic construct
  source 1..37: mol_type = other RNA
aaataaataaataaataaataaataaatataaatata

SEQ ID NO: 7308 - RNA, 37 nt, synthetic construct; identical to SEQ ID NO: 7307
  source 1..37: mol_type = other RNA

SEQ ID NO: 7309 - RNA, 37 nt, synthetic construct; identical to SEQ ID NO: 7307
  source 1..37: mol_type = other RNA

SEQ ID NO: 7310 - RNA, 37 nt, synthetic construct; identical to SEQ ID NO: 7307
  source 1..37: mol_type = other RNA

SEQ ID NO: 7311 - RNA, 37 nt, synthetic construct; identical to SEQ ID NO: 7307
  source 1..37: mol_type = other RNA

SEQ ID NO: 7312 - RNA, 37 nt, synthetic construct; identical to SEQ ID NO: 7307
  source 1..37: mol_type = other RNA

SEQ ID NO: 7313 - RNA, 37 nt, synthetic construct; identical to SEQ ID NO: 7307
  source 1..37: mol_type = other RNA

SEQ ID NO: 7314 - RNA, 37 nt, synthetic construct; identical to SEQ ID NO: 7307
  source 1..37: mol_type = other RNA

SEQ ID NO: 7315 - RNA, 37 nt, synthetic construct; identical to SEQ ID NO: 7307
  source 1..37: mol_type = other RNA

SEQ ID NO: 7316 - RNA, 37 nt, synthetic construct; identical to SEQ ID NO: 7307
  source 1..37: mol_type = other RNA

SEQ ID NO: 7317 - RNA, 37 nt, synthetic construct; identical to SEQ ID NO: 7307
  source 1..37: mol_type = other RNA

SEQ ID NO: 7318 - RNA, 37 nt, synthetic construct; identical to SEQ ID NO: 7307
  source 1..37: mol_type = other RNA

SEQ ID NO: 7319 - RNA, 37 nt, synthetic construct; identical to SEQ ID NO: 7307
  source 1..37: mol_type = other RNA

SEQ ID NO: 7320 - RNA, 37 nt, synthetic construct; identical to SEQ ID NO: 7307
  source 1..37: mol_type = other RNA

SEQ ID NO: 7321 - RNA, 37 nt, synthetic construct; identical to SEQ ID NO: 7307
  source 1..37: mol_type = other RNA

SEQ ID NO: 7322 - RNA, 37 nt, synthetic construct; identical to SEQ ID NO: 7307
  source 1..37: mol_type = other RNA

SEQ ID NO: 7323 - RNA, 37 nt, synthetic construct; identical to SEQ ID NO: 7307
  source 1..37: mol_type = other RNA

SEQ ID NO: 7324 - RNA, 37 nt, synthetic construct; identical to SEQ ID NO: 7307
  source 1..37: mol_type = other RNA

SEQ ID NO: 7325 - RNA, 37 nt, synthetic construct; identical to SEQ ID NO: 7307
  source 1..37: mol_type = other RNA

SEQ ID NO: 7326 - RNA, 37 nt, synthetic construct; identical to SEQ ID NO: 7307
  source 1..37: mol_type = other RNA

SEQ ID NO: 7327 - RNA, 37 nt, synthetic construct; identical to SEQ ID NO: 7307
  source 1..37: mol_type = other RNA

SEQ ID NO: 7328 - RNA, 37 nt, synthetic construct; identical to SEQ ID NO: 7307
  source 1..37: mol_type = other RNA

SEQ ID NO: 7329 - RNA, 37 nt, synthetic construct; identical to SEQ ID NO: 7307
  source 1..37: mol_type = other RNA

SEQ ID NO: 7330 - RNA, 37 nt, synthetic construct; identical to SEQ ID NO: 7307
  source 1..37: mol_type = other RNA

SEQ ID NO: 7331 - RNA, 37 nt, synthetic construct; identical to SEQ ID NO: 7307
  source 1..37: mol_type = other RNA

SEQ ID NO: 7332 - RNA, 37 nt, synthetic construct; identical to SEQ ID NO: 7307
  source 1..37: mol_type = other RNA

SEQ ID NO: 7333 - RNA, 37 nt, synthetic construct; identical to SEQ ID NO: 7307
  source 1..37: mol_type = other RNA

SEQ ID NO: 7334 - RNA, 37 nt, synthetic construct; identical to SEQ ID NO: 7307
  source 1..37: mol_type = other RNA

SEQ ID NO: 7335 - RNA, 37 nt, synthetic construct; identical to SEQ ID NO: 7307
  source 1..37: mol_type = other RNA

SEQ ID NO: 7336 - RNA, 37 nt, synthetic construct; identical to SEQ ID NO: 7307
  source 1..37: mol_type = other RNA

SEQ ID NO: 7337 - RNA, 37 nt, synthetic construct; identical to SEQ ID NO: 7307
  source 1..37: mol_type = other RNA

SEQ ID NO: 7338 - RNA, 37 nt, synthetic construct; identical to SEQ ID NO: 7307
  source 1..37: mol_type = other RNA

SEQ ID NO: 7339 - RNA, 37 nt, synthetic construct; identical to SEQ ID NO: 7307
  source 1..37: mol_type = other RNA

SEQ ID NO: 7340 - RNA, 37 nt, synthetic construct; identical to SEQ ID NO: 7307
  source 1..37: mol_type = other RNA

SEQ ID NO: 7341 - RNA, 37 nt, synthetic construct; identical to SEQ ID NO: 7307
  source 1..37: mol_type = other RNA

SEQ ID NO: 7342 - RNA, 37 nt, synthetic construct; identical to SEQ ID NO: 7307
  source 1..37: mol_type = other RNA

SEQ ID NO: 7343 - RNA, 37 nt, synthetic construct; identical to SEQ ID NO: 7307
  source 1..37: mol_type = other RNA

SEQ ID NO: 7344 - RNA, 37 nt, synthetic construct; identical to SEQ ID NO: 7307
  source 1..37: mol_type = other RNA

SEQ ID NO: 7345 - RNA, 37 nt, synthetic construct; identical to SEQ ID NO: 7307
  source 1..37: mol_type = other RNA

SEQ ID NO: 7346 - RNA, 37 nt, synthetic construct; identical to SEQ ID NO: 7307
  source 1..37: mol_type = other RNA

SEQ ID NO: 7347 - RNA, 37 nt, synthetic construct; identical to SEQ ID NO: 7307
  source 1..37: mol_type = other RNA

SEQ ID NO: 7348 - RNA, 37 nt, synthetic construct; identical to SEQ ID NO: 7307
  source 1..37: mol_type = other RNA

SEQ ID NO: 7349 - RNA, 37 nt, synthetic construct; identical to SEQ ID NO: 7307
  source 1..37: mol_type = other RNA

SEQ ID NO: 7350 - RNA, 37 nt, synthetic construct; identical to SEQ ID NO: 7307
  source 1..37: mol_type = other RNA

SEQ ID NO: 7351 - RNA, 37 nt, synthetic construct; identical to SEQ ID NO: 7307
  source 1..37: mol_type = other RNA

SEQ ID NO: 7352 - RNA, 37 nt, synthetic construct; identical to SEQ ID NO: 7307
  source 1..37: mol_type = other RNA

SEQ ID NO: 7353 - RNA, 37 nt, synthetic construct; identical to SEQ ID NO: 7307
  source 1..37: mol_type = other RNA

SEQ ID NO: 7354 - RNA, 37 nt, synthetic construct; identical to SEQ ID NO: 7307
  source 1..37: mol_type = other RNA

SEQ ID NO: 7355 - RNA, 37 nt, synthetic construct; identical to SEQ ID NO: 7307
  source 1..37: mol_type = other RNA

SEQ ID NO: 7356 - RNA, 37 nt, synthetic construct; identical to SEQ ID NO: 7307
  source 1..37: mol_type = other RNA

SEQ ID NO: 7357 - RNA, 37 nt, synthetic construct; identical to SEQ ID NO: 7307
  source 1..37: mol_type = other RNA

SEQ ID NO: 7358 - RNA, 37 nt, synthetic construct; identical to SEQ ID NO: 7307
  source 1..37: mol_type = other RNA

SEQ ID NO: 7359 - RNA, 37 nt, synthetic construct; identical to SEQ ID NO: 7307
  source 1..37: mol_type = other RNA

SEQ ID NO: 7360 - RNA, 37 nt, synthetic construct; identical to SEQ ID NO: 7307
  source 1..37: mol_type = other RNA

SEQ ID NO: 7361 - RNA, 37 nt, synthetic construct; identical to SEQ ID NO: 7307
  source 1..37: mol_type = other RNA

SEQ ID NO: 7362 - RNA, 37 nt, synthetic construct; identical to SEQ ID NO: 7307
  source 1..37: mol_type = other RNA

SEQ ID NO: 7363 - RNA, 37 nt, synthetic construct; identical to SEQ ID NO: 7307
  source 1..37: mol_type = other RNA

SEQ ID NO: 7364 - RNA, 37 nt, synthetic construct; identical to SEQ ID NO: 7307
  source 1..37: mol_type = other RNA

SEQ ID NO: 7365 - RNA, 37 nt, synthetic construct; identical to SEQ ID NO: 7307
  source 1..37: mol_type = other RNA

SEQ ID NO: 7366 - RNA, 37 nt, synthetic construct; identical to SEQ ID NO: 7307
  source 1..37: mol_type = other RNA

SEQ ID NO: 7367 - RNA, 37 nt, synthetic construct; identical to SEQ ID NO: 7307
  source 1..37: mol_type = other RNA

SEQ ID NO: 7368 - RNA, 37 nt, synthetic construct; identical to SEQ ID NO: 7307
  source 1..37: mol_type = other RNA

SEQ ID NO: 7369 - RNA, 37 nt, synthetic construct; identical to SEQ ID NO: 7307
  source 1..37: mol_type = other RNA

SEQ ID NO: 7370 - RNA, 37 nt, synthetic construct; identical to SEQ ID NO: 7307
  source 1..37: mol_type = other RNA

SEQ ID NO: 7371 - RNA, 37 nt, synthetic construct; identical to SEQ ID NO: 7307
  source 1..37: mol_type = other RNA

SEQ ID NO: 7372 - RNA, 37 nt, synthetic construct; identical to SEQ ID NO: 7307
  source 1..37: mol_type = other RNA

SEQ ID NO: 7373 - RNA, 37 nt, synthetic construct; identical to SEQ ID NO: 7307
  source 1..37: mol_type = other RNA

SEQ ID NO: 7374 - RNA, 37 nt, synthetic construct; identical to SEQ ID NO: 7307
  source 1..37: mol_type = other RNA

SEQ ID NO: 7375 - RNA, 37 nt, synthetic construct; identical to SEQ ID NO: 7307
  source 1..37: mol_type = other RNA

SEQ ID NO: 7376 - RNA, 37 nt, synthetic construct; identical to SEQ ID NO: 7307
  source 1..37: mol_type = other RNA

SEQ ID NO: 7377 - RNA, 37 nt, synthetic construct; identical to SEQ ID NO: 7307
  source 1..37: mol_type = other RNA

SEQ ID NO: 7378 - RNA, 37 nt, synthetic construct; identical to SEQ ID NO: 7307
  source 1..37: mol_type = other RNA

SEQ ID NO: 7379 - RNA, 37 nt, synthetic construct; identical to SEQ ID NO: 7307
  source 1..37: mol_type = other RNA

SEQ ID NO: 7380 - RNA, 37 nt, synthetic construct; identical to SEQ ID NO: 7307
  source 1..37: mol_type = other RNA

SEQ ID NO: 7381 - RNA, 37 nt, synthetic construct; identical to SEQ ID NO: 7307
  source 1..37: mol_type = other RNA

SEQ ID NO: 7382 - RNA, 37 nt, synthetic construct; identical to SEQ ID NO: 7307
  source 1..37: mol_type = other RNA

SEQ ID NO: 7383 - RNA, 37 nt, synthetic construct; identical to SEQ ID NO: 7307
  source 1..37: mol_type = other RNA

SEQ ID NO: 7384 - RNA, 37 nt, synthetic construct; identical to SEQ ID NO: 7307
  source 1..37: mol_type = other RNA

SEQ ID NO: 7385 - RNA, 37 nt, synthetic construct; identical to SEQ ID NO: 7307
  source 1..37: mol_type = other RNA

SEQ ID NO: 7386 - RNA, 37 nt, synthetic construct; identical to SEQ ID NO: 7307
  source 1..37: mol_type = other RNA

SEQ ID NO: 7387 - RNA, 37 nt, synthetic construct; identical to SEQ ID NO: 7307
  source 1..37: mol_type = other RNA

SEQ ID NO: 7388 - RNA, 37 nt, synthetic construct; identical to SEQ ID NO: 7307
  source 1..37: mol_type = other RNA

SEQ ID NO: 7389 - RNA, 37 nt, synthetic construct; identical to SEQ ID NO: 7307
  source 1..37: mol_type = other RNA

SEQ ID NO: 7390 - RNA, 37 nt, synthetic construct; identical to SEQ ID NO: 7307
  source 1..37: mol_type = other RNA

SEQ ID NO: 7391 - RNA, 37 nt, synthetic construct; identical to SEQ ID NO: 7307
  source 1..37: mol_type = other RNA

SEQ ID NO: 7392 - RNA, 37 nt, synthetic construct; identical to SEQ ID NO: 7307
  source 1..37: mol_type = other RNA

SEQ ID NO: 7393 - RNA, 37 nt, synthetic construct; identical to SEQ ID NO: 7307
  source 1..37: mol_type = other RNA

SEQ ID NO: 7394 - RNA, 37 nt, synthetic construct; identical to SEQ ID NO: 7307
  source 1..37: mol_type = other RNA

SEQ ID NO: 7395 - RNA, 37 nt, synthetic construct; identical to SEQ ID NO: 7307
  source 1..37: mol_type = other RNA

SEQ ID NO: 7396 - RNA, 37 nt, synthetic construct; identical to SEQ ID NO: 7307
  source 1..37: mol_type = other RNA

SEQ ID NO: 7397 - RNA, 37 nt, synthetic construct; identical to SEQ ID NO: 7307
  source 1..37: mol_type = other RNA

SEQ ID NO: 7398 - RNA, 37 nt, synthetic construct; identical to SEQ ID NO: 7307
  source 1..37: mol_type = other RNA

SEQ ID NO: 7399 - RNA, 37 nt, synthetic construct; identical to SEQ ID NO: 7307
  source 1..37: mol_type = other RNA

SEQ ID NO: 7400 - RNA, 37 nt, synthetic construct; identical to SEQ ID NO: 7307
  source 1..37: mol_type = other RNA

SEQ ID NO: 7401 - RNA, 37 nt, synthetic construct; identical to SEQ ID NO: 7307
  source 1..37: mol_type = other RNA

SEQ ID NO: 7402 - RNA, 37 nt, synthetic construct; identical to SEQ ID NO: 7307
  source 1..37: mol_type = other RNA

SEQ ID NO: 7403 - RNA, 37 nt, synthetic construct; identical to SEQ ID NO: 7307
  source 1..37: mol_type = other RNA

SEQ ID NO: 7404 - RNA, 37 nt, synthetic construct; identical to SEQ ID NO: 7307
  source 1..37: mol_type = other RNA

SEQ ID NO: 7405 - RNA, 37 nt, synthetic construct; identical to SEQ ID NO: 7307
  source 1..37: mol_type = other RNA

SEQ ID NO: 7406 - RNA, 37 nt, synthetic construct; identical to SEQ ID NO: 7307
  source 1..37: mol_type = other RNA

SEQ ID NO: 7407 - RNA, 37 nt, synthetic construct; identical to SEQ ID NO: 7307
  source 1..37: mol_type = other RNA

SEQ ID NO: 7408 - RNA, 37 nt, synthetic construct; identical to SEQ ID NO: 7307
  source 1..37: mol_type = other RNA

SEQ ID NO: 7409 - RNA, 37 nt, synthetic construct; identical to SEQ ID NO: 7307
  source 1..37: mol_type = other RNA

SEQ ID NO: 7410 - RNA, 37 nt, synthetic construct; identical to SEQ ID NO: 7307
  source 1..37: mol_type = other RNA

SEQ ID NO: 7411 - RNA, 37 nt, synthetic construct; identical to SEQ ID NO: 7307
  source 1..37: mol_type = other RNA

SEQ ID NO: 7412 - RNA, 37 nt, synthetic construct; identical to SEQ ID NO: 7307
  source 1..37: mol_type = other RNA

SEQ ID NO: 7413 - RNA, 37 nt, synthetic construct; identical to SEQ ID NO: 7307
  source 1..37: mol_type = other RNA

SEQ ID NO: 7414 - RNA, 37 nt, synthetic construct; identical to SEQ ID NO: 7307
  source 1..37: mol_type = other RNA

SEQ ID NO: 7415 - RNA, 37 nt, synthetic construct; identical to SEQ ID NO: 7307
  source 1..37: mol_type = other RNA

SEQ ID NO: 7416 - RNA, 37 nt, synthetic construct; identical to SEQ ID NO: 7307
  source 1..37: mol_type = other RNA

SEQ ID NO: 7417 - RNA, 37 nt, synthetic construct; identical to SEQ ID NO: 7307
  source 1..37: mol_type = other RNA

SEQ ID NO: 7418 - RNA, 37 nt, synthetic construct; identical to SEQ ID NO: 7307
  source 1..37: mol_type = other RNA

SEQ ID NO: 7419 - RNA, 37 nt, synthetic construct; identical to SEQ ID NO: 7307
  source 1..37: mol_type = other RNA

SEQ ID NO: 7420 - RNA, 37 nt, synthetic construct; identical to SEQ ID NO: 7307
  source 1..37: mol_type = other RNA

SEQ ID NO: 7421 - RNA, 37 nt, synthetic construct; identical to SEQ ID NO: 7307
  source 1..37: mol_type = other RNA

SEQ ID NO: 7422 - RNA, 37 nt, synthetic construct; identical to SEQ ID NO: 7307
  source 1..37: mol_type = other RNA

SEQ ID NO: 7423 - RNA, 37 nt, synthetic construct; identical to SEQ ID NO: 7307
  source 1..37: mol_type = other RNA

SEQ ID NO: 7424 - RNA, 37 nt, synthetic construct; identical to SEQ ID NO: 7307
  source 1..37: mol_type = other RNA

SEQ ID NO: 7425 - RNA, 37 nt, synthetic construct; identical to SEQ ID NO: 7307
  source 1..37: mol_type = other RNA

SEQ ID NO: 7426 - RNA, 37 nt, synthetic construct; identical to SEQ ID NO: 7307
  source 1..37: mol_type = other RNA

SEQ ID NO: 7427 - RNA, 37 nt, synthetic construct; identical to SEQ ID NO: 7307
  source 1..37: mol_type = other RNA

SEQ ID NO: 7428 - RNA, 37 nt, synthetic construct; identical to SEQ ID NO: 7307
  source 1..37: mol_type = other RNA

SEQ ID NO: 7429 - RNA, 37 nt, synthetic construct; identical to SEQ ID NO: 7307
  source 1..37: mol_type = other RNA

SEQ ID NO: 7430 - RNA, 37 nt, synthetic construct; identical to SEQ ID NO: 7307
  source 1..37: mol_type = other RNA

SEQ ID NO: 7431 - RNA, 37 nt, synthetic construct; identical to SEQ ID NO: 7307
  source 1..37: mol_type = other RNA

SEQ ID NO: 7432 - RNA, 37 nt, synthetic construct; identical to SEQ ID NO: 7307
  source 1..37: mol_type = other RNA

SEQ ID NO: 7433 - RNA, 37 nt, synthetic construct; identical to SEQ ID NO: 7307
  source 1..37: mol_type = other RNA

SEQ ID NO: 7434 - RNA, 37 nt, synthetic construct; identical to SEQ ID NO: 7307
  source 1..37: mol_type = other RNA

SEQ ID NO: 7435 - RNA, 37 nt, synthetic construct; identical to SEQ ID NO: 7307
  source 1..37: mol_type = other RNA

SEQ ID NO: 7436 - RNA, 37 nt, synthetic construct; identical to SEQ ID NO: 7307
  source 1..37: mol_type = other RNA

SEQ ID NO: 7437 - RNA, 37 nt, synthetic construct; identical to SEQ ID NO: 7307
  source 1..37: mol_type = other RNA

SEQ ID NO: 7438 - RNA, 37 nt, synthetic construct; identical to SEQ ID NO: 7307
  source 1..37: mol_type = other RNA

SEQ ID NO: 7439 - RNA, 37 nt, synthetic construct; identical to SEQ ID NO: 7307
  source 1..37: mol_type = other RNA

SEQ ID NO: 7440 - RNA, 37 nt, synthetic construct; identical to SEQ ID NO: 7307
  source 1..37: mol_type = other RNA

SEQ ID NO: 7441 - RNA, 37 nt, synthetic construct; identical to SEQ ID NO: 7307
  source 1..37: mol_type = other RNA

SEQ ID NO: 7442 - RNA, 37 nt, synthetic construct; identical to SEQ ID NO: 7307
  source 1..37: mol_type = other RNA

SEQ ID NO: 7443 - RNA, 37 nt, synthetic construct; identical to SEQ ID NO: 7307
  source 1..37: mol_type = other RNA

SEQ ID NO: 7444 - RNA, 37 nt, synthetic construct; identical to SEQ ID NO: 7307
  source 1..37: mol_type = other RNA

SEQ ID NO: 7445 - RNA, 37 nt, synthetic construct; identical to SEQ ID NO: 7307
  source 1..37: mol_type = other RNA

SEQ ID NO: 7446 - RNA, 37 nt, synthetic construct; identical to SEQ ID NO: 7307
  source 1..37: mol_type = other RNA

SEQ ID NO: 7447 - RNA, 37 nt, synthetic construct; identical to SEQ ID NO: 7307
  source 1..37: mol_type = other RNA

SEQ ID NO: 7448 - RNA, 37 nt, synthetic construct; identical to SEQ ID NO: 7307
  source 1..37: mol_type = other RNA

SEQ ID NO: 7449 - RNA, 37 nt, synthetic construct; identical to SEQ ID NO: 7307
  source 1..37: mol_type = other RNA

SEQ ID NO: 7450 - RNA, 37 nt, synthetic construct; identical to SEQ ID NO: 7307
  source 1..37: mol_type = other RNA

SEQ ID NO: 7451 - RNA, 37 nt, synthetic construct; identical to SEQ ID NO: 7307
  source 1..37: mol_type = other RNA

SEQ ID NO: 7452 - RNA, 37 nt, synthetic construct; identical to SEQ ID NO: 7307
  source 1..37: mol_type = other RNA

SEQ ID NO: 7453 - RNA, 37 nt, synthetic construct; identical to SEQ ID NO: 7307
  source 1..37: mol_type = other RNA

SEQ ID NO: 7454 - RNA, 37 nt, synthetic construct; identical to SEQ ID NO: 7307
  source 1..37: mol_type = other RNA

SEQ ID NO: 7455 - RNA, 37 nt, synthetic construct; identical to SEQ ID NO: 7307
  source 1..37: mol_type = other RNA

SEQ ID NO: 7456 - RNA, 37 nt, synthetic construct; identical to SEQ ID NO: 7307
  source 1..37: mol_type = other RNA

SEQ ID NO: 7457 - RNA, 37 nt, synthetic construct; identical to SEQ ID NO: 7307
  source 1..37: mol_type = other RNA

SEQ ID NO: 7458 - RNA, 37 nt, synthetic construct; identical to SEQ ID NO: 7307
  source 1..37: mol_type = other RNA

SEQ ID NO: 7459 - RNA, 37 nt, synthetic construct; identical to SEQ ID NO: 7307
  source 1..37: mol_type = other RNA

SEQ ID NO: 7460 - RNA, 37 nt, synthetic construct; identical to SEQ ID NO: 7307
  source 1..37: mol_type = other RNA

SEQ ID NO: 7461 - RNA, 37 nt, synthetic construct; identical to SEQ ID NO: 7307
  source 1..37: mol_type = other RNA

SEQ ID NO: 7462 - RNA, 37 nt, synthetic construct; identical to SEQ ID NO: 7307
  source 1..37: mol_type = other RNA

SEQ ID NO: 7463 - RNA, 37 nt, synthetic construct; identical to SEQ ID NO: 7307
  source 1..37: mol_type = other RNA

SEQ ID NO: 7464 - RNA, 37 nt, synthetic construct; identical to SEQ ID NO: 7307
  source 1..37: mol_type = other RNA

SEQ ID NO: 7465 - RNA, 37 nt, synthetic construct; identical to SEQ ID NO: 7307
  source 1..37: mol_type = other RNA

SEQ ID NO: 7466 - RNA, 37 nt, synthetic construct; identical to SEQ ID NO: 7307
  source 1..37: mol_type = other RNA

SEQ ID NO: 7467 - RNA, 37 nt, synthetic construct; identical to SEQ ID NO: 7307
  source 1..37: mol_type = other RNA

SEQ ID NO: 7468 - RNA, 37 nt, synthetic construct; identical to SEQ ID NO: 7307
  source 1..37: mol_type = other RNA

SEQ ID NO: 7469 - RNA, 37 nt, synthetic construct; identical to SEQ ID NO: 7307
  source 1..37: mol_type = other RNA

SEQ ID NO: 7470 - RNA, 37 nt, synthetic construct; identical to SEQ ID NO: 7307
  source 1..37: mol_type = other RNA

SEQ ID NO: 7471 - RNA, 37 nt, synthetic construct; identical to SEQ ID NO: 7307
  source 1..37: mol_type = other RNA

SEQ ID NO: 7472 - RNA, 37 nt, synthetic construct; identical to SEQ ID NO: 7307
  source 1..37: mol_type = other RNA

SEQ ID NO: 7473 - RNA, 37 nt, synthetic construct; identical to SEQ ID NO: 7307
  source 1..37: mol_type = other RNA

SEQ ID NO: 7474 - RNA, 37 nt, synthetic construct; identical to SEQ ID NO: 7307
  source 1..37: mol_type = other RNA

SEQ ID NO: 7475 - RNA, 37 nt, synthetic construct; identical to SEQ ID NO: 7307
  source 1..37: mol_type = other RNA

SEQ ID NO: 7476 - RNA, 37 nt, synthetic construct; identical to SEQ ID NO: 7307
  source 1..37: mol_type = other RNA

SEQ ID NO: 7477 - RNA, 37 nt, synthetic construct; identical to SEQ ID NO: 7307
  source 1..37: mol_type = other RNA

SEQ ID NO: 7478 - RNA, 37 nt, synthetic construct; identical to SEQ ID NO: 7307
  source 1..37: mol_type = other RNA

SEQ ID NO: 7479 - RNA, 37 nt, synthetic construct; identical to SEQ ID NO: 7307
  source 1..37: mol_type = other RNA

SEQ ID NO: 7480 - RNA, 37 nt, synthetic construct; identical to SEQ ID NO: 7307
  source 1..37: mol_type = other RNA

SEQ ID NO: 7481 - RNA, 37 nt, synthetic construct; identical to SEQ ID NO: 7307
  source 1..37: mol_type = other RNA

SEQ ID NO: 7482 - RNA, 37 nt, synthetic construct; identical to SEQ ID NO: 7307
  source 1..37: mol_type = other RNA

SEQ ID NO: 7483 - RNA, 37 nt, synthetic construct; identical to SEQ ID NO: 7307
  source 1..37: mol_type = other RNA

SEQ ID NO: 7484 - RNA, 37 nt, synthetic construct; identical to SEQ ID NO: 7307
  source 1..37: mol_type = other RNA

SEQ ID NO: 7485 - RNA, 37 nt, synthetic construct; identical to SEQ ID NO: 7307
  source 1..37: mol_type = other RNA

SEQ ID NO: 7486 - RNA, 37 nt, synthetic construct; identical to SEQ ID NO: 7307
  source 1..37: mol_type = other RNA

SEQ ID NO: 7487 - RNA, 37 nt, synthetic construct; identical to SEQ ID NO: 7307
  source 1..37: mol_type = other RNA

SEQ ID NO: 7488 - RNA, 37 nt, synthetic construct; identical to SEQ ID NO: 7307
  source 1..37: mol_type = other RNA

SEQ ID NO: 7489 - RNA, 37 nt, synthetic construct; identical to SEQ ID NO: 7307
  source 1..37: mol_type = other RNA

SEQ ID NO: 7490 - RNA, 37 nt, synthetic construct; identical to SEQ ID NO: 7307
  source 1..37: mol_type = other RNA

SEQ ID NO: 7491 - RNA, 37 nt, synthetic construct; identical to SEQ ID NO: 7307
  source 1..37: mol_type = other RNA

SEQ ID NO: 7492 - RNA, 37 nt, synthetic construct; identical to SEQ ID NO: 7307
  source 1..37: mol_type = other RNA

SEQ ID NO: 7493 - RNA, 37 nt, synthetic construct; identical to SEQ ID NO: 7307
  source 1..37: mol_type = other RNA

SEQ ID NO: 7494 - RNA, 37 nt, synthetic construct; identical to SEQ ID NO: 7307
  source 1..37: mol_type = other RNA

SEQ ID NO: 7495 - RNA, 37 nt, synthetic construct; identical to SEQ ID NO: 7307
  source 1..37: mol_type = other RNA

SEQ ID NO: 7496 - RNA, 37 nt, synthetic construct; identical to SEQ ID NO: 7307
  source 1..37: mol_type = other RNA

SEQ ID NO: 7497 - RNA, 37 nt, synthetic construct; identical to SEQ ID NO: 7307
  source 1..37: mol_type = other RNA

SEQ ID NO: 7498 - RNA, 37 nt, synthetic construct; identical to SEQ ID NO: 7307
  source 1..37: mol_type = other RNA

SEQ ID NO: 7499 - RNA, 37 nt, synthetic construct; identical to SEQ ID NO: 7307
  source 1..37: mol_type = other RNA

SEQ ID NO: 7500 - RNA, 37 nt, synthetic construct; identical to SEQ ID NO: 7307
  source 1..37: mol_type = other RNA

SEQ ID NO: 7501 - RNA, 37 nt, synthetic construct; identical to SEQ ID NO: 7307
  source 1..37: mol_type = other RNA

SEQ ID NO: 7502 - RNA, 37 nt, synthetic construct; identical to SEQ ID NO: 7307
  source 1..37: mol_type = other RNA

SEQ ID NO: 7503 - RNA, 37 nt, synthetic construct; identical to SEQ ID NO: 7307
  source 1..37: mol_type = other RNA

SEQ ID NO: 7504 - RNA, 37 nt, synthetic construct; identical to SEQ ID NO: 7307
  source 1..37: mol_type = other RNA

SEQ ID NO: 7505 - RNA, 37 nt, synthetic construct; identical to SEQ ID NO: 7307
  source 1..37: mol_type = other RNA

SEQ ID NO: 7506 - RNA, 37 nt, synthetic construct; identical to SEQ ID NO: 7307
  source 1..37: mol_type = other RNA

SEQ ID NO: 7507 - RNA, 37 nt, synthetic construct; identical to SEQ ID NO: 7307
  source 1..37: mol_type = other RNA

SEQ ID NO: 7508 - RNA, 37 nt, synthetic construct; identical to SEQ ID NO: 7307
  source 1..37: mol_type = other RNA

SEQ ID NO: 7509 - RNA, 38 nt, synthetic construct
  source 1..38: mol_type = other RNA
aaataaataaataaataaataaataaataaataaataa

SEQ ID NO: 7510 - RNA, 38 nt, synthetic construct
  source 1..38: mol_type = other RNA
aaaaaaaaaaaaaaaaaaaaaaaaaaaaaaaaaatata

SEQ ID NO: 7511 - RNA, 38 nt, synthetic construct
  source 1..38: mol_type = other RNA
aaaaaaaaaaaaaaaaaaaaaaaaaaaaaataaatata

SEQ ID NO: 7512 - RNA, 38 nt, synthetic construct
  source 1..38: mol_type = other RNA
aaaaaaaaaaaaaaaaaaaaaaaaaataaataaatata

SEQ ID NO: 7513 - RNA, 38 nt, synthetic construct
  source 1..38: mol_type = other RNA
aaaaaaaaaaaaaaaaaaaaaataaataaataaatata

SEQ ID NO: 7514 - RNA, 38 nt, synthetic construct
  source 1..38: mol_type = other RNA
aaaaaaaaaaaaaaaaaataaataaataaataaatata

SEQ ID NO: 7515 - RNA, 38 nt, synthetic construct
  source 1..38: mol_type = other RNA
aaaaaaaaaaaaaataaataaataaataaataaatata

SEQ ID NO: 7516 - RNA, 38 nt, synthetic construct
  source 1..38: mol_type = other RNA
aaataaataaataaataaataaataaataaataaatat

SEQ ID NO: 7517 - RNA, 38 nt, synthetic construct
  source 1..38: mol_type = other RNA
aaaaaaaaaataaataaataaataaataaataaatata

SEQ ID NO: 7518 - RNA, 38 nt, synthetic construct
  source 1..38: mol_type = other RNA
aaaaaataaataaataaataaataaataaataaatata

SEQ ID NO: 7519 - RNA, 38 nt, synthetic construct
  source 1..38: mol_type = other RNA
aaaaaaaaaaaaaaaaaaaaaaaaaaaatataaatata

SEQ ID NO: 7520 - RNA, 38 nt, synthetic construct
  source 1..38: mol_type = other RNA
aaaaaaaaaaaaaaaaaaaaaaaatataaataaatata

SEQ ID NO: 7521 - RNA, 38 nt, synthetic construct
  source 1..38: mol_type = other RNA
aaaaaaaaaaaaaaaaaaaaaaaataaatataaatata

SEQ ID NO: 7522 - RNA, 38 nt, synthetic construct
  source 1..38: mol_type = other RNA
aataaataaataaataaataaataaataaataaatata

SEQ ID NO: 7523 - RNA, 38 nt, synthetic construct
  source 1..38: mol_type = other RNA
aaaaaaaaaaaaaaaaaaaataaatataaataaatata

SEQ ID NO: 7524 - RNA, 38 nt, synthetic construct
  source 1..38: mol_type = other RNA
aaaaaaaaaaaaaaaaaaaataaataaatataaatata

SEQ ID NO: 7525 - RNA, 38 nt, synthetic construct
  source 1..38: mol_type = other RNA
aaaaaaaaaaaaaaaaaaaatataaataaataaatata

SEQ ID NO: 7526 - RNA, 38 nt, synthetic construct
  source 1..38: mol_type = other RNA
aaaaaaaaaaaaaaaataaataaataaatataaatata

SEQ ID NO: 7527 - RNA, 38 nt, synthetic construct
  source 1..38: mol_type = other RNA
aaaaaaaaaaaaaaaataaataaatataaataaatata

SEQ ID NO: 7528 - RNA, 38 nt, synthetic construct
  source 1..38: mol_type = other RNA
aaaaaaaaaaaaaaaataaatataaataaataaatata

SEQ ID NO: 7529 - RNA, 38 nt, synthetic construct
  source 1..38: mol_type = other RNA
aaaaaaaaaaaaaaaatataaataaataaataaatata

SEQ ID NO: 7530 - RNA, 38 nt, synthetic construct
  source 1..38: mol_type = other RNA
aaaaaaaaaaaataaataaataaatataaataaatata

SEQ ID NO: 7531 - RNA, 38 nt, synthetic construct
  source 1..38: mol_type = other RNA
aaaaaaaaaaaataaataaataaataaatataaatata

SEQ ID NO: 7532 - RNA, 38 nt, synthetic construct
  source 1..38: mol_type = other RNA
aaaaaaaaaaaataaataaatataaataaataaatata

SEQ ID NO: 7533 - RNA, 38 nt, synthetic construct
  source 1..38: mol_type = other RNA
aaaaaaaaaaaatataaataaataaataaataaatata

SEQ ID NO: 7534 - RNA, 38 nt, synthetic construct
  source 1..38: mol_type = other RNA
aaataaaaaaaaaaaaaaaaaaaaaaaaaaaaaatata

SEQ ID NO: 7535 - RNA, 38 nt, synthetic construct
  source 1..38: mol_type = other RNA
aaaaaaaatataaataaataaataaataaataaatata

SEQ ID NO: 7536 - RNA, 38 nt, synthetic construct
  source 1..38: mol_type = other RNA
aaaaaaaataaataaataaataaatataaataaatata

SEQ ID NO: 7537 - RNA, 38 nt, synthetic construct
  source 1..38: mol_type = other RNA
aaaaaaaataaataaataaatataaataaataaatata

SEQ ID NO: 7538 - RNA, 38 nt, synthetic construct
  source 1..38: mol_type = other RNA
aaaaaaaataaataaataaataaataaatataaatata

SEQ ID NO: 7539 - RNA, 38 nt, synthetic construct
  source 1..38: mol_type = other RNA
aaataaataaaaaaaaaaaaaaaaaaaaaaaaaatata

SEQ ID NO: 7540 - RNA, 38 nt, synthetic construct
  source 1..38: mol_type = other RNA
aaataaaaaaaaaaaaaaaaaaaaaaaaaataaatata

SEQ ID NO: 7541 - RNA, 38 nt, synthetic construct
  source 1..38: mol_type = other RNA
aaaatataaataaataaataaataaataaataaatata

SEQ ID NO: 7542 - RNA, 38 nt, synthetic construct
  source 1..38: mol_type = other RNA
aaaataaatataaataaataaataaataaataaatata

SEQ ID NO: 7543 - RNA, 38 nt, synthetic construct
  source 1..38: mol_type = other RNA
aaaataaataaataaataaataaatataaataaatata

SEQ ID NO: 7544 - RNA, 38 nt, synthetic construct
  source 1..38: mol_type = other RNA
aaaataaataaatataaataaataaataaataaatata

SEQ ID NO: 7545 - RNA, 38 nt, synthetic construct
  source 1..38: mol_type = other RNA
aaataaataaaaaaaaaaaaaaaaaaaaaataaatata

SEQ ID NO: 7546 - RNA, 38 nt, synthetic construct
  source 1..38: mol_type = other RNA
aaataaataaataaaaaaaaaaaaaaaaaaaaaatata

SEQ ID NO: 7547 - RNA, 38 nt, synthetic construct
  source 1..38: mol_type = other RNA
aaataaaaaaaaaaaaaaaaaaaaaataaataaatata

SEQ ID NO: 7548 - RNA, 38 nt, synthetic construct
  source 1..38: mol_type = other RNA
aaataaataaataaataaaaaaaaaaaaaaaaaatata

SEQ ID NO: 7549 - RNA, 38 nt, synthetic construct
  source 1..38: mol_type = other RNA
aaataaataaaaaaaaaaaaaaaaaataaataaatata

SEQ ID NO: 7550 - RNA, 38 nt, synthetic construct
  source 1..38: mol_type = other RNA
aaataaataaataaaaaaaaaaaaaaaaaataaatata

SEQ ID NO: 7551 - RNA, 38 nt, synthetic construct
  source 1..38: mol_type = other RNA
aaataaaaaaaaaaaaaaaaaataaataaataaatata

SEQ ID NO: 7552 - RNA, 38 nt, synthetic construct
  source 1..38: mol_type = other RNA
aaaaaaaaaaaaaaaaaaaaaaaaaaaaaaaatatata

SEQ ID NO: 7553 - RNA, 38 nt, synthetic construct
  source 1..38: mol_type = other RNA
aaataaataaataaataaataaaaaaaaaaaaaatata

SEQ ID NO: 7554 - RNA, 38 nt, synthetic construct
  source 1..38: mol_type = other RNA
aaaaaaaaaaaaaaaaaaaaaaaaaaaataaatatata

SEQ ID NO: 7555 - RNA, 38 nt, synthetic construct
  source 1..38: mol_type = other RNA
aaataaataaataaaaaaaaaaaaaataaataaatata

SEQ ID NO: 7556 - RNA, 38 nt, synthetic construct
  source 1..38: mol_type = other RNA
aaataaataaataaataaaaaaaaaaaaaataaatata

SEQ ID NO: 7557 - RNA, 38 nt, synthetic construct
  source 1..38: mol_type = other RNA
aaataaataaaaaaaaaaaaaataaataaataaatata

SEQ ID NO: 7558 - RNA, 38 nt, synthetic construct
  source 1..38: mol_type = other RNA
aaataaaaaaaaaaaaaataaataaataaataaatata

SEQ ID NO: 7559 - RNA, 38 nt, synthetic construct
  source 1..38: mol_type = other RNA
aaaaaaaaaaaaaaaaaaaaaaaaaaaaaaaaaaataa

SEQ ID NO: 7560 - RNA, 38 nt, synthetic construct
  source 1..38: mol_type = other RNA
aaataaaaaaaaaataaataaataaataaataaatata

SEQ ID NO: 7561 - RNA, 38 nt, synthetic construct
  source 1..38: mol_type = other RNA
aaataaataaataaataaaaaaaaaataaataaatata

SEQ ID NO: 7562 - RNA, 38 nt, synthetic construct
  source 1..38: mol_type = other RNA
aaataaataaataaaaaaaaaataaataaataaatata

SEQ ID NO: 7563 - RNA, 38 nt, synthetic construct
  source 1..38: mol_type = other RNA
aaataaataaataaataaataaataaaaaaaaaatata

SEQ ID NO: 7564 - RNA, 38 nt, synthetic construct
  source 1..38: mol_type = other RNA
aaataaataaataaataaataaaaaaaaaataaatata

SEQ ID NO: 7565 - RNA, 38 nt, synthetic construct
  source 1..38: mol_type = other RNA
aaataaataaaaaaaaaataaataaataaataaatata

SEQ ID NO: 7566 - RNA, 38 nt, synthetic construct
  source 1..38: mol_type = other RNA
aaaaaaaaaaaaaaaaaaaaaaaataaataaatatata

SEQ ID NO: 7567 - RNA, 38 nt, synthetic construct
  source 1..38: mol_type = other RNA
aaaaaaaaaaaaaaaaaaaaaaaaaaaaaaataaataa

SEQ ID NO: 7568 - RNA, 38 nt, synthetic construct
  source 1..38: mol_type = other RNA
aaataaaaaataaataaataaataaataaataaatata

SEQ ID NO: 7569 - RNA, 38 nt, synthetic construct
  source 1..38: mol_type = other RNA
aaataaataaataaaaaataaataaataaataaatata

SEQ ID NO: 7570 - RNA, 38 nt, synthetic construct
  source 1..38: mol_type = other RNA
aaataaataaataaataaaaaataaataaataaatata

SEQ ID NO: 7571 - RNA, 38 nt, synthetic construct
  source 1..38: mol_type = other RNA
aaataaataaaaaataaataaataaataaataaatata

SEQ ID NO: 7572 - RNA, 38 nt, synthetic construct
  source 1..38: mol_type = other RNA
aaataaataaataaataaataaataaataaaaaatata

SEQ ID NO: 7573 - RNA, 38 nt, synthetic construct
  source 1..38: mol_type = other RNA
aaataaataaataaataaataaaaaataaataaatata

SEQ ID NO: 7574 - RNA, 38 nt, synthetic construct
  source 1..38: mol_type = other RNA
aaaaaaaaaaaaaaaaaaaataaataaataaatatata

SEQ ID NO: 7575 - RNA, 38 nt, synthetic construct
  source 1..38: mol_type = other RNA
aaaaaaaaaaaaaaaaaaaaaaaaaaataaataaataa

SEQ ID NO: 7576 - RNA, 38 nt, synthetic construct
  source 1..38: mol_type = other RNA
aaaaaaaaaaaaaaaataaataaataaataaatatata

SEQ ID NO: 7577 - RNA, 38 nt, synthetic construct
  source 1..38: mol_type = other RNA
aaaaaaaaaaaaaaaaaaaaaaaaaaaaaaaaaataaa

SEQ ID NO: 7578 - RNA, 38 nt, synthetic construct
  source 1..38: mol_type = other RNA
aaaaaaaaaaaaaaaaaaaaaaataaataaataaataa

SEQ ID NO: 7579 - RNA, 38 nt, synthetic construct
  source 1..38: mol_type = other RNA
aaaaaaaaaaaataaataaataaataaataaatatata

SEQ ID NO: 7580 - RNA, 38 nt, synthetic construct
  source 1..38: mol_type = other RNA
aaaaaaaaaaaaaaaaaaaaaaaaaaaaaataaataaa

SEQ ID NO: 7581 - RNA, 38 nt, synthetic construct
  source 1..38: mol_type = other RNA
aaaaaaaaaaaaaaaaaaataaataaataaataaataa

SEQ ID NO: 7582 - RNA, 38 nt, synthetic construct
  source 1..38: mol_type = other RNA
aaaaaaaataaataaataaataaataaataaatatata

SEQ ID NO: 7583 - RNA, 38 nt, synthetic construct
  source 1..38: mol_type = other RNA
aaaaaaaaaaaaaaaaaaaaaaaaaataaataaataaa

SEQ ID NO: 7584 - RNA, 38 nt, synthetic construct
  source 1..38: mol_type = other RNA
aaaaaaaaaaaaaaataaataaataaataaataaataa

SEQ ID NO: 7585 - RNA, 38 nt, synthetic construct
  source 1..38: mol_type = other RNA
aaaaaaaaaaaaaaaaaaaaaataaataaataaataaa

SEQ ID NO: 7586 - RNA, 38 nt, synthetic construct
  source 1..38: mol_type = other RNA
aaaaaaaaaaataaataaataaataaataaataaataa

SEQ ID NO: 7587 - RNA, 38 nt, synthetic construct
  source 1..38: mol_type = other RNA
aaaaaaaaaaaaaaaaaataaataaataaataaataaa

SEQ ID NO: 7588 - RNA, 38 nt, synthetic construct
  source 1..38: mol_type = other RNA
aaaaaaataaataaataaataaataaataaataaataa

SEQ ID NO: 7589 - RNA, 38 nt, synthetic construct
  source 1..38: mol_type = other RNA
aaaaaaaaaaaaaataaataaataaataaataaataaa

SEQ ID NO: 7590 - RNA, 38 nt, synthetic construct
  source 1..38: mol_type = other RNA
aaaaaaaaaataaataaataaataaataaataaataaa

SEQ ID NO: 7591 - RNA, 38 nt, synthetic construct
  source 1..38: mol_type = other RNA
aaaaaaaaaaaaaaaaaaaaaaaaaaaaaaaaaaatat

SEQ ID NO: 7592 - RNA, 38 nt, synthetic construct
  source 1..38: mol_type = other RNA
aaaaaataaataaataaataaataaataaataaataaa

SEQ ID NO: 7593 - RNA, 38 nt, synthetic construct
  source 1..38: mol_type = other RNA
aaaaaaaaaaaaaaaaaaaaaaaaaaaaaaataaatat

SEQ ID NO: 7594 - RNA, 38 nt, synthetic construct
  source 1..38: mol_type = other RNA
aaaaaaaaaaaaaaaaaaaaaaaaaaataaataaatat

SEQ ID NO: 7595 - RNA, 38 nt, synthetic construct
  source 1..38: mol_type = other RNA
aaaaaaaaaaaaaaaaaaaaaaataaataaataaatat

SEQ ID NO: 7596 - RNA, 38 nt, synthetic construct
  source 1..38: mol_type = other RNA
aaaaaaaaaaaaaaaaaaataaataaataaataaatat

SEQ ID NO: 7597 - RNA, 38 nt, synthetic construct
  source 1..38: mol_type = other RNA
aaaaaaaaaaaaaaataaataaataaataaataaatat

SEQ ID NO: 7598 - RNA, 38 nt, synthetic construct
  source 1..38: mol_type = other RNA
aaaaaaaaaaataaataaataaataaataaataaatat

SEQ ID NO: 7599 - RNA, 38 nt, synthetic construct
  source 1..38: mol_type = other RNA
aaaaaaataaataaataaataaataaataaataaatat

SEQ ID NO: 7600 - RNA, 38 nt, synthetic construct
  source 1..38: mol_type = other RNA
aaataaataaataaataaataaataaatataaatataa

SEQ ID NO: 7601 - RNA, 38 nt, synthetic construct
  source 1..38: mol_type = other RNA
aaatataaataaatataaataaataaataaataaataa

SEQ ID NO: 7602 - RNA, 38 nt, synthetic construct
  source 1..38: mol_type = other RNA
aaatataaatataaataaataaataaataaataaataa

SEQ ID NO: 7603 - RNA, 38 nt, synthetic construct
  source 1..38: mol_type = other RNA
aaataaataaatataaataaataaataaatataaataa

SEQ ID NO: 7604 - RNA, 38 nt, synthetic construct
  source 1..38: mol_type = other RNA
aaataaatataaataaataaataaataaatataaataa

SEQ ID NO: 7605 - RNA, 38 nt, synthetic construct
  source 1..38: mol_type = other RNA
aaatataaataaataaataaataaataaataaatataa

SEQ ID NO: 7606 - RNA, 38 nt, synthetic construct
  source 1..38: mol_type = other RNA
aaataaataaataaataaatataaatataaataaataa

SEQ ID NO: 7607 - RNA, 38 nt, synthetic construct
  source 1..38: mol_type = other RNA
aaataaatataaataaataaataaataaataaatataa

SEQ ID NO: 7608 - RNA, 38 nt, synthetic construct
  source 1..38: mol_type = other RNA
aaataaatataaataaataaataaatataaataaataa

SEQ ID NO: 7609 - RNA, 38 nt, synthetic construct
  source 1..38: mol_type = other RNA
aaataaataaatataaataaatataaataaataaataa

SEQ ID NO: 7610 - RNA, 38 nt, synthetic construct
  source 1..38: mol_type = other RNA
aaataaataaatataaatataaataaataaataaataa

SEQ ID NO: 7611 - RNA, 38 nt, synthetic construct
  source 1..38: mol_type = other RNA
aaatataaataaataaataaataaatataaataaataa

SEQ ID NO: 7612 - RNA, 38 nt, synthetic construct
  source 1..38: mol_type = other RNA
aaataaatataaatataaataaataaataaataaataa

SEQ ID NO: 7613 - RNA, 38 nt, synthetic construct
  source 1..38: mol_type = other RNA
aaataataaataaataaataaataaataaataaatata

SEQ ID NO: 7614 - RNA, 38 nt, synthetic construct
  source 1..38: mol_type = other RNA
aaataaataaataaataataaataaataaataaatata

SEQ ID NO: 7615 - RNA, 38 nt, synthetic construct
  source 1..38: mol_type = other RNA
aaataaataaataataaataaataaataaataaatata

SEQ ID NO: 7616 - RNA, 38 nt, synthetic construct
  source 1..38: mol_type = other RNA
aaataaataataaataaataaataaataaataaatata

SEQ ID NO: 7617 - RNA, 38 nt, synthetic construct
  source 1..38: mol_type = other RNA
aaaaaaaaaaaaaaaaaaaaaaaaaaaaaaaaaaaata

SEQ ID NO: 7618 - RNA, 38 nt, synthetic construct
  source 1..38: mol_type = other RNA
aaaaaaaaaaaaaaaaaaaaaaaaaaaaaaaataaata

SEQ ID NO: 7619 - RNA, 38 nt, synthetic construct
  source 1..38: mol_type = other RNA
aaaaaaaaaaaaaaaaaaaaaatataaatataaatata

SEQ ID NO: 7620 - RNA, 38 nt, synthetic construct
  source 1..38: mol_type = other RNA
aaaaaaaaaaaaaaaaaaaaaaaaaaaataaataaata

SEQ ID NO: 7621 - RNA, 38 nt, synthetic construct
  source 1..38: mol_type = other RNA
aaaaaaaaaaaaaaaaaatataaatataaataaatata

SEQ ID NO: 7622 - RNA, 38 nt, synthetic construct
  source 1..38: mol_type = other RNA
aaaaaaaaaaaaaaaaaatataaataaatataaatata

SEQ ID NO: 7623 - RNA, 38 nt, synthetic construct
  source 1..38: mol_type = other RNA
aaaaaaaaaaaaaaaaaataaatataaatataaatata

SEQ ID NO: 7624 - RNA, 38 nt, synthetic construct
  source 1..38: mol_type = other RNA
aaaaaaaaaaaaaaaaaaaaaaaataaataaataaata

SEQ ID NO: 7625 - RNA, 38 nt, synthetic construct
  source 1..38: mol_type = other RNA
aaataaataaataaataaataaataaataaatatataa

SEQ ID NO: 7626 - RNA, 38 nt, synthetic construct
  source 1..38: mol_type = other RNA
aaatatataaataaataaataaataaataaataaataa

SEQ ID NO: 7627 - RNA, 38 nt, synthetic construct
  source 1..38: mol_type = other RNA
aaataaataaatatataaataaataaataaataaataa

SEQ ID NO: 7628 - RNA, 38 nt, synthetic construct
  source 1..38: mol_type = other RNA
aaataaataaataaataaataaataaatatataaataa

SEQ ID NO: 7629 - RNA, 38 nt, synthetic construct
  source 1..38: mol_type = other RNA
aaataaataaataaatatataaataaataaataaataa

SEQ ID NO: 7630 - RNA, 38 nt, synthetic construct
  source 1..38: mol_type = other RNA
aaataaatatataaataaataaataaataaataaataa

SEQ ID NO: 7631 - RNA, 38 nt, synthetic construct
  source 1..38: mol_type = other RNA
aaataaataaataaataaataaatatataaataaataa

SEQ ID NO: 7632 - RNA, 38 nt, synthetic construct
  source 1..38: mol_type = other RNA
aaaaaaaaaaaaaataaatataaatataaataaatata

SEQ ID NO: 7633 - RNA, 38 nt, synthetic construct
  source 1..38: mol_type = other RNA
aaaaaaaaaaaaaataaataaatataaatataaatata

SEQ ID NO: 7634 - RNA, 38 nt, synthetic construct
  source 1..38: mol_type = other RNA
aaaaaaaaaaaaaataaatataaataaatataaatata

SEQ ID NO: 7635 - RNA, 38 nt, synthetic construct
  source 1..38: mol_type = other RNA
aaaaaaaaaaaaaatataaataaatataaataaatata

SEQ ID NO: 7636 - RNA, 38 nt, synthetic construct
  source 1..38: mol_type = other RNA
aaaaaaaaaaaaaatataaatataaataaataaatata

SEQ ID NO: 7637 - RNA, 38 nt, synthetic construct
  source 1..38: mol_type = other RNA
aaaaaaaaaaaaaatataaataaataaatataaatata

SEQ ID NO: 7638 - RNA, 38 nt, synthetic construct
  source 1..38: mol_type = other RNA
aaatataaatataaataaataaataaataaataaatat

SEQ ID NO: 7639 - RNA, 38 nt, synthetic construct
  source 1..38: mol_type = other RNA
aaatataaataaatataaataaataaataaataaatat

SEQ ID NO: 7640 - RNA, 38 nt, synthetic construct
  source 1..38: mol_type = other RNA
aaataaataaatataaataaataaataaatataaatat

SEQ ID NO: 7641 - RNA, 38 nt, synthetic construct
  source 1..38: mol_type = other RNA
aaataaatataaataaataaataaataaatataaatat

SEQ ID NO: 7642 - RNA, 38 nt, synthetic construct
  source 1..38: mol_type = other RNA
aaataaataaataaataaataaatataaatataaatat

SEQ ID NO: 7643 - RNA, 38 nt, synthetic construct
  source 1..38: mol_type = other RNA
aaataaataaataaatataaataaataaatataaatat

SEQ ID NO: 7644 - RNA, 38 nt, synthetic construct
  source 1..38: mol_type = other RNA
aaataaataaataaataaatataaataaatataaatat

SEQ ID NO: 7645 - RNA, 38 nt, synthetic construct
  source 1..38: mol_type = other RNA
aaataaataaatataaataaatataaataaataaatat

SEQ ID NO: 7646 - RNA, 38 nt, synthetic construct
  source 1..38: mol_type = other RNA
aaataaataaatataaatataaataaataaataaatat

SEQ ID NO: 7647 - RNA, 38 nt, synthetic construct
  source 1..38: mol_type = other RNA
aaataaatataaatataaataaataaataaataaatat

SEQ ID NO: 7648 - RNA, 38 nt, synthetic construct
  source 1..38: mol_type = other RNA
aaaaaaaaaaaaaaaaaaaataaataaataaataaata

SEQ ID NO: 7649 - RNA, 38 nt, synthetic construct
  source 1..38: mol_type = other RNA
aaaaaaaaaataaatataaataaatataaataaatata

SEQ ID NO: 7650 - RNA, 38 nt, synthetic construct
  source 1..38: mol_type = other RNA
aaaaaaaaaataaatataaataaataaatataaatata

SEQ ID NO: 7651 - RNA, 38 nt, synthetic construct
  source 1..38: mol_type = other RNA
aaaaaaaaaatataaataaataaatataaataaatata

SEQ ID NO: 7652 - RNA, 38 nt, synthetic construct
  source 1..38: mol_type = other RNA
aaaaaaaaaatataaataaataaataaatataaatata

SEQ ID NO: 7653 - RNA, 38 nt, synthetic construct
  source 1..38: mol_type = other RNA
aaaaaaaaaatataaataaatataaataaataaatata

SEQ ID NO: 7654 - RNA, 38 nt, synthetic construct
  source 1..38: mol_type = other RNA
aaaaaaaaaataaataaatataaatataaataaatata

SEQ ID NO: 7655 - RNA, 38 nt, synthetic construct
  source 1..38: mol_type = other RNA
aaaaaaaaaatataaatataaataaataaataaatata

SEQ ID NO: 7656 - RNA, 38 nt, synthetic construct
  source 1..38: mol_type = other RNA
aaaaaaaaaataaataaataaatataaatataaatata

SEQ ID NO: 7657 - RNA, 38 nt, synthetic construct
  source 1..38: mol_type = other RNA
aaaaaaaaaataaatataaatataaataaataaatata

SEQ ID NO: 7658 - RNA, 38 nt, synthetic construct
  source 1..38: mol_type = other RNA
aaaaaaaaaataaataaatataaataaatataaatata

SEQ ID NO: 7659 - RNA, 38 nt, synthetic construct
  source 1..38: mol_type = other RNA
aaatataaaaaaaaaaaaaaaaaaaaaaaaaaaatata

SEQ ID NO: 7660 - RNA, 38 nt, synthetic construct
  source 1..38: mol_type = other RNA
aaaaaaaaaaaaaaaataaataaataaataaataaata

SEQ ID NO: 7661 - RNA, 38 nt, synthetic construct
  source 1..38: mol_type = other RNA
aaaaaataaatataaataaataaatataaataaatata

SEQ ID NO: 7662 - RNA, 38 nt, synthetic construct
  source 1..38: mol_type = other RNA
aaaaaataaatataaataaataaataaatataaatata

SEQ ID NO: 7663 - RNA, 38 nt, synthetic construct
  source 1..38: mol_type = other RNA
aaaaaataaataaatataaataaatataaataaatata

SEQ ID NO: 7664 - RNA, 38 nt, synthetic construct
  source 1..38: mol_type = other RNA
aaaaaataaataaatataaataaataaatataaatata

SEQ ID NO: 7665 - RNA, 38 nt, synthetic construct
  source 1..38: mol_type = other RNA
aaaaaatataaataaataaataaataaatataaatata

SEQ ID NO: 7666 - RNA, 38 nt, synthetic construct
  source 1..38: mol_type = other RNA
aaaaaataaataaataaatataaatataaataaatata

SEQ ID NO: 7667 - RNA, 38 nt, synthetic construct
  source 1..38: mol_type = other RNA
aaaaaataaataaataaataaatataaatataaatata

SEQ ID NO: 7668 - RNA, 38 nt, synthetic construct
  source 1..38: mol_type = other RNA
aaaaaataaataaataaatataaataaatataaatata

SEQ ID NO: 7669 - RNA, 38 nt, synthetic construct
  source 1..38: mol_type = other RNA
aaaaaatataaataaataaataaatataaataaatata

SEQ ID NO: 7670 - RNA, 38 nt, synthetic construct
  source 1..38: mol_type = other RNA
aaaaaataaataaatataaatataaataaataaatata

SEQ ID NO: 7671 - RNA, 38 nt, synthetic construct
  source 1..38: mol_type = other RNA
aaataaaaaaaaaaaaaaaaaaaaaaaatataaatata

SEQ ID NO: 7672 - RNA, 38 nt, synthetic construct
  source 1..38: mol_type = other RNA
aaataaatataaaaaaaaaaaaaaaaaaaaaaaatata

SEQ ID NO: 7673 - RNA, 38 nt, synthetic construct
  source 1..38: mol_type = other RNA
aaatataaataaaaaaaaaaaaaaaaaaaaaaaatata

SEQ ID NO: 7674 - RNA, 38 nt, synthetic construct
  source 1..38: mol_type = other RNA
aaatataaaaaaaaaaaaaaaaaaaaaaaataaatata

SEQ ID NO: 7675 - RNA, 38 nt, synthetic construct
  source 1..38: mol_type = other RNA
aaaaaaaaaaaataaataaataaataaataaataaata

SEQ ID NO: 7676 - RNA, 38 nt, synthetic construct
  source 1..38: mol_type = other RNA
aaatataaataaataaaaaaaaaaaaaaaaaaaatata

SEQ ID NO: 7677 - RNA, 38 nt, synthetic construct
  source 1..38: mol_type = other RNA
aaataaaaaaaaaaaaaaaaaaaatataaataaatata

SEQ ID NO: 7678 - RNA, 38 nt, synthetic construct
  source 1..38: mol_type = other RNA
aaataaatataaaaaaaaaaaaaaaaaaaataaatata

SEQ ID NO: 7679 - RNA, 38 nt, synthetic construct
  source 1..38: mol_type = other RNA
aaataaatataaataaaaaaaaaaaaaaaaaaaatata

SEQ ID NO: 7680 - RNA, 38 nt, synthetic construct
  source 1..38: mol_type = other RNA
aaatataaataaaaaaaaaaaaaaaaaaaataaatata

SEQ ID NO: 7681 - RNA, 38 nt, synthetic construct
  source 1..38: mol_type = other RNA
aaataaataaaaaaaaaaaaaaaaaaaatataaatata

SEQ ID NO: 7682 - RNA, 38 nt, synthetic construct
  source 1..38: mol_type = other RNA
aaataaaaaaaaaaaaaaaaaaaataaatataaatata

SEQ ID NO: 7683 - RNA, 38 nt, synthetic construct
  source 1..38: mol_type = other RNA
aaataaataaatataaaaaaaaaaaaaaaaaaaatata

SEQ ID NO: 7684 - RNA, 38 nt, synthetic construct
  source 1..38: mol_type = other RNA
aaatataaaaaaaaaaaaaaaaaaaataaataaatata

SEQ ID NO: 7685 - RNA, 38 nt, synthetic construct
  source 1..38: mol_type = other RNA
aaaaaaaataaataaataaataaataaataaataaata

SEQ ID NO: 7686 - RNA, 38 nt, synthetic construct
  source 1..38: mol_type = other RNA
aaataaaaaaaaaaaaaaaataaatataaataaatata

SEQ ID NO: 7687 - RNA, 38 nt, synthetic construct
  source 1..38: mol_type = other RNA
aaatataaataaataaaaaaaaaaaaaaaataaatata

SEQ ID NO: 7688 - RNA, 38 nt, synthetic construct
  source 1..38: mol_type = other RNA
aaataaataaaaaaaaaaaaaaaatataaataaatata

SEQ ID NO: 7689 - RNA, 38 nt, synthetic construct
  source 1..38: mol_type = other RNA
aaataaatataaaaaaaaaaaaaaaataaataaatata

SEQ ID NO: 7690 - RNA, 38 nt, synthetic construct
  source 1..38: mol_type = other RNA
aaataaatataaataaaaaaaaaaaaaaaataaatata

SEQ ID NO: 7691 - RNA, 38 nt, synthetic construct
  source 1..38: mol_type = other RNA
aaataaaaaaaaaaaaaaaataaataaatataaatata

SEQ ID NO: 7692 - RNA, 38 nt, synthetic construct
  source 1..38: mol_type = other RNA
aaataaataaatataaaaaaaaaaaaaaaataaatata

SEQ ID NO: 7693 - RNA, 38 nt, synthetic construct
  source 1..38: mol_type = other RNA
aaataaataaataaaaaaaaaaaaaaaatataaatata

SEQ ID NO: 7694 - RNA, 38 nt, synthetic construct
  source 1..38: mol_type = other RNA
aaatataaataaaaaaaaaaaaaaaataaataaatata

SEQ ID NO: 7695 - RNA, 38 nt, synthetic construct
  source 1..38: mol_type = other RNA
aaatataaataaataaataaaaaaaaaaaaaaaatata

SEQ ID NO: 7696 - RNA, 38 nt, synthetic construct
  source 1..38: mol_type = other RNA
aaataaataaataaatataaaaaaaaaaaaaaaatata

SEQ ID NO: 7697 - RNA, 38 nt, synthetic construct
  source 1..38: mol_type = other RNA
aaataaaaaaaaaaaaaaaatataaataaataaatata

SEQ ID NO: 7698 - RNA, 38 nt, synthetic construct
  source 1..38: mol_type = other RNA
aaatataaaaaaaaaaaaaaaataaataaataaatata

SEQ ID NO: 7699 - RNA, 38 nt, synthetic construct
  source 1..38: mol_type = other RNA
aaataaatataaataaataaaaaaaaaaaaaaaatata

SEQ ID NO: 7700 - RNA, 38 nt, synthetic construct
  source 1..38: mol_type = other RNA
aaataaataaatataaataaaaaaaaaaaaaaaatata

SEQ ID NO: 7701 - RNA, 38 nt, synthetic construct
  source 1..38: mol_type = other RNA
aaaataaataaataaataaataaataaataaataaata

SEQ ID NO: 7702 - RNA, 38 nt, synthetic construct
  source 1..38: mol_type = other RNA
aaataaataaataaataaatataaaaaaaaaaaatata

SEQ ID NO: 7703 - RNA, 38 nt, synthetic construct
  source 1..38: mol_type = other RNA
aaataaaaaaaaaaaataaataaatataaataaatata

SEQ ID NO: 7704 - RNA, 38 nt, synthetic construct
  source 1..38: mol_type = other RNA
aaatataaataaataaaaaaaaaaaataaataaatata

SEQ ID NO: 7705 - RNA, 38 nt, synthetic construct
  source 1..38: mol_type = other RNA
aaataaatataaataaaaaaaaaaaataaataaatata

SEQ ID NO: 7706 - RNA, 38 nt, synthetic construct
  source 1..38: mol_type = other RNA
aaataaataaataaaaaaaaaaaatataaataaatata

SEQ ID NO: 7707 - RNA, 38 nt, synthetic construct
  source 1..38: mol_type = other RNA
aaataaataaataaatataaataaaaaaaaaaaatata

SEQ ID NO: 7708 - RNA, 38 nt, synthetic construct
  source 1..38: mol_type = other RNA
aaataaaaaaaaaaaataaatataaataaataaatata

SEQ ID NO: 7709 - RNA, 38 nt, synthetic construct
  source 1..38: mol_type = other RNA
aaataaataaaaaaaaaaaataaatataaataaatata

SEQ ID NO: 7710 - RNA, 38 nt, synthetic construct
  source 1..38: mol_type = other RNA
aaataaataaaaaaaaaaaataaataaatataaatata

SEQ ID NO: 7711 - RNA, 38 nt, synthetic construct
  source 1..38: mol_type = other RNA
aaatataaataaataaataaaaaaaaaaaataaatata

SEQ ID NO: 7712 - RNA, 38 nt, synthetic construct
  source 1..38: mol_type = other RNA
aaataaataaataaaaaaaaaaaataaatataaatata

SEQ ID NO: 7713 - RNA, 38 nt, synthetic construct
  source 1..38: mol_type = other RNA
aaataaataaatataaataaaaaaaaaaaataaatata

SEQ ID NO: 7714 - RNA, 38 nt, synthetic construct
  source 1..38: mol_type = other RNA
aaataaatataaataaataaaaaaaaaaaataaatata

SEQ ID NO: 7715 - RNA, 38 nt, synthetic construct
  source 1..38: mol_type = other RNA
aaatataaataaataaataaataaaaaaaaaaaatata

SEQ ID NO: 7716 - RNA, 38 nt, synthetic construct
  source 1..38: mol_type = other RNA
aaataaataaataaatataaaaaaaaaaaataaatata

SEQ ID NO: 7717 - RNA, 38 nt, synthetic construct
  source 1..38: mol_type = other RNA
aaataaataaatataaaaaaaaaaaataaataaatata

SEQ ID NO: 7718 - RNA, 38 nt, synthetic construct
  source 1..38: mol_type = other RNA
aaataaataaataaataaaaaaaaaaaatataaatata

SEQ ID NO: 7719 - RNA, 38 nt, synthetic construct
  source 1..38: mol_type = other RNA
aaataaaaaaaaaaaatataaataaataaataaatata

SEQ ID NO: 7720 - RNA, 38 nt, synthetic construct
  source 1..38: mol_type = other RNA
aaatataaataaaaaaaaaaaataaataaataaatata

SEQ ID NO: 7721 - RNA, 38 nt, synthetic construct
  source 1..38: mol_type = other RNA
aaataaatataaaaaaaaaaaataaataaataaatata

SEQ ID NO: 7722 - RNA, 38 nt, synthetic construct
  source 1..38: mol_type = other RNA
aaataaataaaaaaaaaaaatataaataaataaatata

SEQ ID NO: 7723 - RNA, 38 nt, synthetic construct
  source 1..38: mol_type = other RNA
aaataaatataaataaataaataaaaaaaaaaaatata

SEQ ID NO: 7724 - RNA, 38 nt, synthetic construct
  source 1..38: mol_type = other RNA
aaataaataaatataaataaataaaaaaaaaaaatata

SEQ ID NO: 7725 - RNA, 38 nt, synthetic construct
  source 1..38: mol_type = other RNA
aaatataaaaaaaaaaaataaataaataaataaatata

SEQ ID NO: 7726 - RNA, 39 nt, synthetic construct
  source 1..39: mol_type = other RNA
aaataaataaataaataaataaataaataaataaatata

SEQ ID NO: 7727 - RNA, 39 nt, synthetic construct
  source 1..39: mol_type = other RNA
aaataaataaataaataaataaataaataaataaataaa

SEQ ID NO: 7728 - RNA, 39 nt, synthetic construct
  source 1..39: mol_type = other RNA
aaaaaaaaaaaaaaaaaaaaaaaaaaaaaaaaaaatata

SEQ ID NO: 7729 - RNA, 39 nt, synthetic construct
  source 1..39: mol_type = other RNA
aaaaaaaaaaaaaaaaaaaaaaaaaaaaaaataaatata

SEQ ID NO: 7730 - RNA, 39 nt, synthetic construct
  source 1..39: mol_type = other RNA
aaaaaaaaaaaaaaaaaaaaaaaaaaataaataaatata

SEQ ID NO: 7731 - RNA, 39 nt, synthetic construct
  source 1..39: mol_type = other RNA
aaaaaaaaaaaaaaaaaaaaaaataaataaataaatata

SEQ ID NO: 7732 - RNA, 39 nt, synthetic construct
  source 1..39: mol_type = other RNA
aaaaaaaaaaaaaaaaaaataaataaataaataaatata

SEQ ID NO: 7733 - RNA, 39 nt, synthetic construct
  source 1..39: mol_type = other RNA
aaaaaaaaaaaaaaataaataaataaataaataaatata

SEQ ID NO: 7734 - RNA, 39 nt, synthetic construct
  source 1..39: mol_type = other RNA
aaaaaaaaaaataaataaataaataaataaataaatata

SEQ ID NO: 7735 - RNA, 39 nt, synthetic construct
  source 1..39: mol_type = other RNA
aaaaaaataaataaataaataaataaataaataaatata

SEQ ID NO: 7736 - RNA, 39 nt, synthetic construct
  source 1..39: mol_type = other RNA
aaatataaataaatataaataaataaataaataaatata

SEQ ID NO: 7737 - RNA, 39 nt, synthetic construct
  source 1..39: mol_type = other RNA
aaatataaatataaataaataaataaataaataaatata

SEQ ID NO: 7738 - RNA, 39 nt, synthetic construct
  source 1..39: mol_type = other RNA
aaatataaataaataaatataaataaataaataaatata

SEQ ID NO: 7739 - RNA, 39 nt, synthetic construct
  source 1..39: mol_type = other RNA
aaataaataaataaatataaatataaataaataaatata

SEQ ID NO: 7740 - RNA, 39 nt, synthetic construct
  source 1..39: mol_type = other RNA
aaataaataaatataaataaataaatataaataaatata

SEQ ID NO: 7741 - RNA, 39 nt, synthetic construct
  source 1..39: mol_type = other RNA
aaataaataaatataaataaatataaataaataaatata

SEQ ID NO: 7742 - RNA, 39 nt, synthetic construct
  source 1..39: mol_type = other RNA
aaataaataaataaatataaataaatataaataaatata

SEQ ID NO: 7743 - RNA, 39 nt, synthetic construct
  source 1..39: mol_type = other RNA
aaataaatataaataaataaataaatataaataaatata

SEQ ID NO: 7744 - RNA, 39 nt, synthetic construct
  source 1..39: mol_type = other RNA
aaataaatataaataaataaatataaataaataaatata

SEQ ID NO: 7745 - RNA, 39 nt, synthetic construct
  source 1..39: mol_type = other RNA
aaatataaataaataaataaataaataaatataaatata

SEQ ID NO: 7746 - RNA, 39 nt, synthetic construct
  source 1..39: mol_type = other RNA
aaatataaataaataaataaataaatataaataaatata

SEQ ID NO: 7747 - RNA, 39 nt, synthetic construct
  source 1..39: mol_type = other RNA
aaataaataaataaataaatataaataaatataaatata

SEQ ID NO: 7748 - RNA, 39 nt, synthetic construct
  source 1..39: mol_type = other RNA
aaataaataaataaatataaataaataaatataaatata

SEQ ID NO: 7749 - RNA, 39 nt, synthetic construct
  source 1..39: mol_type = other RNA
aaataaataaatataaataaataaataaatataaatata

SEQ ID NO: 7750 - RNA, 39 nt, synthetic construct
  source 1..39: mol_type = other RNA
aaataaataaataaataaataaatataaataaatatata

SEQ ID NO: 7751 - RNA, 39 nt, synthetic construct
  source 1..39: mol_type = other RNA
aaataaataaatataaataaataaataaataaatatata

SEQ ID NO: 7752 - RNA, 39 nt, synthetic construct
  source 1..39: mol_type = other RNA
aaatataaataaataaataaataaataaataaatatata

SEQ ID NO: 7753 - RNA, 39 nt, synthetic construct
  source 1..39: mol_type = other RNA
aaataaataaataaataaatatataaataaataaatata

SEQ ID NO: 7754 - RNA, 39 nt, synthetic construct
  source 1..39: mol_type = other RNA
aaataaatatataaataaataaataaataaataaatata

SEQ ID NO: 7755 - RNA, 39 nt, synthetic construct
  source 1..39: mol_type = other RNA
aaatatataaataaataaataaataaataaataaatata

SEQ ID NO: 7756 - RNA, 39 nt, synthetic construct
  source 1..39: mol_type = other RNA
aaataaatataaataaataaataaataaataaatatata

SEQ ID NO: 7757 - RNA, 39 nt, synthetic construct
  source 1..39: mol_type = other RNA
aaataaataaataaataaataaataaatataaatatata

SEQ ID NO: 7758 - RNA, 39 nt, synthetic construct
  source 1..39: mol_type = other RNA
aaaaaaaaaaaaaaaaaaaaaaaaaaaaatataaatata

SEQ ID NO: 7759 - RNA, 39 nt, synthetic construct
  source 1..39: mol_type = other RNA
aaaaaaaaaaaaaaaaaaaaaaaaatataaataaatata

SEQ ID NO: 7760 - RNA, 39 nt, synthetic construct
  source 1..39: mol_type = other RNA
aaaaaaaaaaaaaaaaaaaaaaaaataaatataaatata

SEQ ID NO: 7761 - RNA, 39 nt, synthetic construct
  source 1..39: mol_type = other RNA
aaaaaaaaaaaaaaaaaaaaataaatataaataaatata

SEQ ID NO: 7762 - RNA, 39 nt, synthetic construct
  source 1..39: mol_type = other RNA
aaaaaaaaaaaaaaaaaaaaatataaataaataaatata

SEQ ID NO: 7763 - RNA, 39 nt, synthetic construct
  source 1..39: mol_type = other RNA
aaaaaaaaaaaaaaaaaaaaataaataaatataaatata

SEQ ID NO: 7764 - RNA, 39 nt, synthetic construct
  source 1..39: mol_type = other RNA
aaaaaaaaaaaaaaaaataaataaatataaataaatata

SEQ ID NO: 7765 - RNA, 39 nt, synthetic construct
  source 1..39: mol_type = other RNA
aaaaaaaaaaaaaaaaataaataaataaatataaatata

SEQ ID NO: 7766 - RNA, 39 nt, synthetic construct
  source 1..39: mol_type = other RNA
aaaaaaaaaaaaaaaaatataaataaataaataaatata

SEQ ID NO: 7767 - RNA, 39 nt, synthetic construct
  source 1..39: mol_type = other RNA
aaaaaaaaaaaaaaaaataaatataaataaataaatata

SEQ ID NO: 7768 - RNA, 39 nt, synthetic construct
  source 1..39: mol_type = other RNA
aaaaaaaaaaaaatataaataaataaataaataaatata

SEQ ID NO: 7769 - RNA, 39 nt, synthetic construct
  source 1..39: mol_type = other RNA
aaaaaaaaaaaaataaataaataaatataaataaatata

SEQ ID NO: 7770 - RNA, 39 nt, synthetic construct
  source 1..39: mol_type = other RNA
aaaaaaaaaaaaataaataaatataaataaataaatata

SEQ ID NO: 7771 - RNA, 39 nt, synthetic construct
  source 1..39: mol_type = other RNA
aaaaaaaaaaaaataaatataaataaataaataaatata

SEQ ID NO: 7772 - RNA, 39 nt, synthetic construct
  source 1..39: mol_type = other RNA
aaaaaaaaaaaaataaataaataaataaatataaatata

SEQ ID NO: 7773 - RNA, 39 nt, synthetic construct
  source 1..39: mol_type = other RNA
aaataaaaaaaaaaaaaaaaaaaaaaaaaaaaaaatata

SEQ ID NO: 7774 - RNA, 39 nt, synthetic construct
  source 1..39: mol_type = other RNA
aaaaaaaaataaatataaataaataaataaataaatata

SEQ ID NO: 7775 - RNA, 39 nt, synthetic construct
  source 1..39: mol_type = other RNA
aaaaaaaaatataaataaataaataaataaataaatata

SEQ ID NO: 7776 - RNA, 39 nt, synthetic construct
  source 1..39: mol_type = other RNA
aaaaaaaaataaataaatataaataaataaataaatata

SEQ ID NO: 7777 - RNA, 39 nt, synthetic construct
  source 1..39: mol_type = other RNA
aaaaaaaaataaataaataaataaataaatataaatata

SEQ ID NO: 7778 - RNA, 39 nt, synthetic construct
  source 1..39: mol_type = other RNA
aaaaaaaaataaataaataaataaatataaataaatata

SEQ ID NO: 7779 - RNA, 39 nt, synthetic construct
  source 1..39: mol_type = other RNA
aaaaaaaaataaataaataaatataaataaataaatata

SEQ ID NO: 7780 - RNA, 39 nt, synthetic construct
  source 1..39: mol_type = other RNA
aaataaataaaaaaaaaaaaaaaaaaaaaaaaaaatata

SEQ ID NO: 7781 - RNA, 39 nt, synthetic construct
  source 1..39: mol_type = other RNA
aaataaaaaaaaaaaaaaaaaaaaaaaaaaataaatata

SEQ ID NO: 7782 - RNA, 39 nt, synthetic construct
  source 1..39: mol_type = other RNA
aaaaataaatataaataaataaataaataaataaatata

SEQ ID NO: 7783 - RNA, 39 nt, synthetic construct
  source 1..39: mol_type = other RNA
aaaaataaataaataaatataaataaataaataaatata

SEQ ID NO: 7784 - RNA, 39 nt, synthetic construct
  source 1..39: mol_type = other RNA
aaaaataaataaataaataaataaataaatataaatata

SEQ ID NO: 7785 - RNA, 39 nt, synthetic construct
  source 1..39: mol_type = other RNA
aaaaataaataaataaataaataaatataaataaatata

SEQ ID NO: 7786 - RNA, 39 nt, synthetic construct
  source 1..39: mol_type = other RNA
aaaaataaataaataaataaatataaataaataaatata

SEQ ID NO: 7787 - RNA, 39 nt, synthetic construct
  source 1..39: mol_type = other RNA
aaataaataaaaaaaaaaaaaaaaaaaaaaataaatata

SEQ ID NO: 7788 - RNA, 39 nt, synthetic construct
  source 1..39: mol_type = other RNA
aaataaaaaaaaaaaaaaaaaaaaaaataaataaatata

SEQ ID NO: 7789 - RNA, 39 nt, synthetic construct
  source 1..39: mol_type = other RNA
aaataaataaataaaaaaaaaaaaaaaaaaaaaaatata

SEQ ID NO: 7790 - RNA, 39 nt, synthetic construct
  source 1..39: mol_type = other RNA
aaaaaaaaaaaaaaaaaaaaaaaaaaaaaaaaatatata

SEQ ID NO: 7791 - RNA, 39 nt, synthetic construct
  source 1..39: mol_type = other RNA
aaataaaaaaaaaaaaaaaaaaataaataaataaatata

SEQ ID NO: 7792 - RNA, 39 nt, synthetic construct
  source 1..39: mol_type = other RNA
aaataaataaaaaaaaaaaaaaaaaaataaataaatata

SEQ ID NO: 7793 - RNA, 39 nt, synthetic construct
  source 1..39: mol_type = other RNA
aaataaataaataaataaaaaaaaaaaaaaaaaaatata

SEQ ID NO: 7794 - RNA, 39 nt, synthetic construct
  source 1..39: mol_type = other RNA
aaataaataaataaaaaaaaaaaaaaaaaaataaatata

SEQ ID NO: 7795 - RNA, 39 nt, synthetic construct
  source 1..39: mol_type = other RNA
aaataaataaaaaaaaaaaaaaataaataaataaatata

SEQ ID NO: 7796 - RNA, 39 nt, synthetic construct
  source 1..39: mol_type = other RNA
aaataaaaaaaaaaaaaaataaataaataaataaatata

SEQ ID NO: 7797 - RNA, 39 nt, synthetic construct
  source 1..39: mol_type = other RNA
aaataaataaataaataaataaaaaaaaaaaaaaatata

SEQ ID NO: 7798 - RNA, 39 nt, synthetic construct
  source 1..39: mol_type = other RNA
aaataaataaataaaaaaaaaaaaaaataaataaatata

SEQ ID NO: 7799 - RNA, 39 nt, synthetic construct
  source 1..39: mol_type = other RNA
aaataaataaataaataaaaaaaaaaaaaaataaatata

SEQ ID NO: 7800 - RNA, 39 nt, synthetic construct
  source 1..39: mol_type = other RNA
aaaaaaaaaaaaaaaaaaaaaaaaaaaaataaatatata

SEQ ID NO: 7801 - RNA, 39 nt, synthetic construct
  source 1..39: mol_type = other RNA
aaaaaaaaaaaaaaaaaaaaaaaaaaaaaaaaaaaataa

SEQ ID NO: 7802 - RNA, 39 nt, synthetic construct
  source 1..39: mol_type = other RNA
aaataaataaataaataaataaataaataaataaataat

SEQ ID NO: 7803 - RNA, 39 nt, synthetic construct
  source 1..39: mol_type = other RNA
aaaaaaaaaaaaaaaaaaaaaaaaataaataaatatata

SEQ ID NO: 7804 - RNA, 39 nt, synthetic construct
  source 1..39: mol_type = other RNA
aaataaataaaaaaaaaaataaataaataaataaatata

SEQ ID NO: 7805 - RNA, 39 nt, synthetic construct
  source 1..39: mol_type = other RNA
aaataaaaaaaaaaataaataaataaataaataaatata

SEQ ID NO: 7806 - RNA, 39 nt, synthetic construct
  source 1..39: mol_type = other RNA
aaataaataaataaaaaaaaaaataaataaataaatata

SEQ ID NO: 7807 - RNA, 39 nt, synthetic construct
  source 1..39: mol_type = other RNA
aaataaataaataaataaataaataaaaaaaaaaatata

SEQ ID NO: 7808 - RNA, 39 nt, synthetic construct
  source 1..39: mol_type = other RNA
aaataaataaataaataaaaaaaaaaataaataaatata

SEQ ID NO: 7809 - RNA, 39 nt, synthetic construct
  source 1..39: mol_type = other RNA
aaataaataaataaataaataaaaaaaaaaataaatata

SEQ ID NO: 7810 - RNA, 39 nt, synthetic construct
  source 1..39: mol_type = other RNA
aaaaaaaaaaaaaaaaaaaaaaaaaaaaaaaataaataa

SEQ ID NO: 7811 - RNA, 39 nt, synthetic construct
  source 1..39: mol_type = other RNA
aaataaataaataaaaaaataaataaataaataaatata

SEQ ID NO: 7812 - RNA, 39 nt, synthetic construct
  source 1..39: mol_type = other RNA
aaataaaaaaataaataaataaataaataaataaatata

SEQ ID NO: 7813 - RNA, 39 nt, synthetic construct
  source 1..39: mol_type = other RNA
aaataaataaataaataaataaaaaaataaataaatata

SEQ ID NO: 7814 - RNA, 39 nt, synthetic construct
  source 1..39: mol_type = other RNA
aaataaataaataaataaataaataaaaaaataaatata

SEQ ID NO: 7815 - RNA, 39 nt, synthetic construct
  source 1..39: mol_type = other RNA
aaataaataaataaataaaaaaataaataaataaatata

SEQ ID NO: 7816 - RNA, 39 nt, synthetic construct
  source 1..39: mol_type = other RNA
aaataaataaaaaaataaataaataaataaataaatata

SEQ ID NO: 7817 - RNA, 39 nt, synthetic construct
  source 1..39: mol_type = other RNA
aaataaataaataaataaataaataaataaaaaaatata

SEQ ID NO: 7818 - RNA, 39 nt, synthetic construct
  source 1..39: mol_type = other RNA
aaaaaaaaaaaaaaaaaaaaataaataaataaatatata

SEQ ID NO: 7819 - RNA, 39 nt, synthetic construct
  source 1..39: mol_type = other RNA
aaaaaaaaaaaaaaaaaaaaaaaaaaaataaataaataa

SEQ ID NO: 7820 - RNA, 39 nt, synthetic construct
  source 1..39: mol_type = other RNA
aaaaaaaaaaaaaaaaataaataaataaataaatatata

SEQ ID NO: 7821 - RNA, 39 nt, synthetic construct
  source 1..39: mol_type = other RNA
aaaaaaaaaaaaaaaaaaaaaaaaaaaaaaaaaaataaa

SEQ ID NO: 7822 - RNA, 39 nt, synthetic construct
  source 1..39: mol_type = other RNA
aaaaaaaaaaaaaaaaaaaaaaaataaataaataaataa

SEQ ID NO: 7823 - RNA, 39 nt, synthetic construct
  source 1..39: mol_type = other RNA
aaaaaaaaaaaaataaataaataaataaataaatatata

SEQ ID NO: 7824 - RNA, 39 nt, synthetic construct
  source 1..39: mol_type = other RNA
aaaaaaaaaaaaaaaaaaaaaaaaaaaaaaataaataaa

SEQ ID NO: 7825 - RNA, 39 nt, synthetic construct
  source 1..39: mol_type = other RNA
aaaaaaaaaaaaaaaaaaaataaataaataaataaataa

SEQ ID NO: 7826 - RNA, 39 nt, synthetic construct
  source 1..39: mol_type = other RNA
aaaaaaaaataaataaataaataaataaataaatatata

SEQ ID NO: 7827 - RNA, 39 nt, synthetic construct
  source 1..39: mol_type = other RNA
aaaaaaaaaaaaaaaaaaaaaaaaaaataaataaataaa

SEQ ID NO: 7828 - RNA, 39 nt, synthetic construct
  source 1..39: mol_type = other RNA
aaaaaaaaaaaaaaaataaataaataaataaataaataa

SEQ ID NO: 7829 - RNA, 39 nt, synthetic construct
  source 1..39: mol_type = other RNA
aaaaataaataaataaataaataaataaataaatatata

SEQ ID NO: 7830 - RNA, 39 nt, synthetic construct
  source 1..39: mol_type = other RNA
aaaaaaaaaaaaaaaaaaaaaaataaataaataaataaa

SEQ ID NO: 7831 - RNA, 39 nt, synthetic construct
  source 1..39: mol_type = other RNA
aaaaaaaaaaaataaataaataaataaataaataaataa

SEQ ID NO: 7832 - RNA, 39 nt, synthetic construct
  source 1..39: mol_type = other RNA
aaaaaaaaaaaaaaaaaaataaataaataaataaataaa

SEQ ID NO: 7833 - RNA, 39 nt, synthetic construct
  source 1..39: mol_type = other RNA
aaaaaaaataaataaataaataaataaataaataaataa

SEQ ID NO: 7834 - RNA, 39 nt, synthetic construct
  source 1..39: mol_type = other RNA
aaaaaaaaaaaaaaataaataaataaataaataaataaa

SEQ ID NO: 7835 - RNA, 39 nt, synthetic construct
  source 1..39: mol_type = other RNA
aaaataaataaataaataaataaataaataaataaataa

SEQ ID NO: 7836 - RNA, 39 nt, synthetic construct
  source 1..39: mol_type = other RNA
aaaaaaaaaaataaataaataaataaataaataaataaa

SEQ ID NO: 7837 - RNA, 39 nt, synthetic construct
  source 1..39: mol_type = other RNA
aaaaaaaaaaaaaaaaaaaaaaaaaaaaaaaaaaaatat

SEQ ID NO: 7838 - RNA, 39 nt, synthetic construct
  source 1..39: mol_type = other RNA
aaaaaaataaataaataaataaataaataaataaataaa

SEQ ID NO: 7839 - RNA, 39 nt, synthetic construct
  source 1..39: mol_type = other RNA
aaaaaaaaaaaaaaaaaaaaaaaaaaaaaaaataaatat

SEQ ID NO: 7840 - RNA, 39 nt, synthetic construct
  source 1..39: mol_type = other RNA
aaataaataaataaataaataaatataaataaataaata

SEQ ID NO: 7841 - RNA, 39 nt, synthetic construct
  source 1..39: mol_type = other RNA
aaataaataaataaataaataaataaataaatataaata

SEQ ID NO: 7842 - RNA, 39 nt, synthetic construct
  source 1..39: mol_type = other RNA
aaataaataaataaataaataaataaatataaataaata

SEQ ID NO: 7843 - RNA, 39 nt, synthetic construct
  source 1..39: mol_type = other RNA
aaataaataaatataaataaataaataaataaataaata

SEQ ID NO: 7844 - RNA, 39 nt, synthetic construct
  source 1..39: mol_type = other RNA
aaataaatataaataaataaataaataaataaataaata

SEQ ID NO: 7845 - RNA, 39 nt, synthetic construct
  source 1..39: mol_type = other RNA
aaataaataaataaatataaataaataaataaataaata

SEQ ID NO: 7846 - RNA, 39 nt, synthetic construct
  source 1..39: mol_type = other RNA
aaataaataaataaataaatataaataaataaataaata

SEQ ID NO: 7847 - RNA, 39 nt, synthetic construct
  source 1..39: mol_type = other RNA
aaaaaaaaaaaaaaaaaaaaaaaaaaaataaataaatat

SEQ ID NO: 7848 - RNA, 39 nt, synthetic construct
  source 1..39: mol_type = other RNA
aaaaaaaaaaaaaaaaaaaaaaaataaataaataaatat

SEQ ID NO: 7849 - RNA, 39 nt, synthetic construct
  source 1..39: mol_type = other RNA
aaaaaaaaaaaaaaaaaaaataaataaataaataaatat

SEQ ID NO: 7850 - RNA, 39 nt, synthetic construct
  source 1..39: mol_type = other RNA
aaaaaaaaaaaaaaaataaataaataaataaataaatat

SEQ ID NO: 7851 - RNA, 39 nt, synthetic construct
  source 1..39: mol_type = other RNA
aaaaaaaaaaaataaataaataaataaataaataaatat

SEQ ID NO: 7852 - RNA, 39 nt, synthetic construct
  source 1..39: mol_type = other RNA
aaaaaaaataaataaataaataaataaataaataaatat

SEQ ID NO: 7853 - RNA, 39 nt, synthetic construct
  source 1..39: mol_type = other RNA
aaaataaataaataaataaataaataaataaataaatat

SEQ ID NO: 7854 - RNA, 39 nt, synthetic construct
  source 1..39: mol_type = other RNA
aaataaataaataaataaataaatataaataaatataaa

SEQ ID NO: 7855 - RNA, 39 nt, synthetic construct
  source 1..39: mol_type = other RNA
aaataaataaatataaataaataaataaataaatataaa

SEQ ID NO: 7856 - RNA, 39 nt, synthetic construct
  source 1..39: mol_type = other RNA
aaataaataaataaatataaataaataaataaatataaa

SEQ ID NO: 7857 - RNA, 39 nt, synthetic construct
  source 1..39: mol_type = other RNA
aaatataaataaataaataaataaataaataaatataaa

SEQ ID NO: 7858 - RNA, 39 nt, synthetic construct
  source 1..39: mol_type = other RNA
aaatataaataaataaataaataaataaatataaataaa

SEQ ID NO: 7859 - RNA, 39 nt, synthetic construct
  source 1..39: mol_type = other RNA
aaataaataaataaataaatataaatataaataaataaa

SEQ ID NO: 7860 - RNA, 39 nt, synthetic construct
  source 1..39: mol_type = other RNA
aaatataaatataaataaataaataaataaataaataaa

SEQ ID NO: 7861 - RNA, 39 nt, synthetic construct
  source 1..39: mol_type = other RNA
aaataaatataaataaataaataaataaataaatataaa

SEQ ID NO: 7862 - RNA, 39 nt, synthetic construct
  source 1..39: mol_type = other RNA
aaataaataaataaatataaataaatataaataaataaa

SEQ ID NO: 7863 - RNA, 39 nt, synthetic construct
  source 1..39: mol_type = other RNA
aaataaataaataaataaatataaataaatataaataaa

SEQ ID NO: 7864 - RNA, 39 nt, synthetic construct
  source 1..39: mol_type = other RNA
aaataaataaataaataaataaataaatataaatataaa

SEQ ID NO: 7865 - RNA, 39 nt, synthetic construct
  source 1..39: mol_type = other RNA
aaaaaaaaaaaaaaaaaaaaaaaaaaaaaaaaaaaaata

SEQ ID NO: 7866 - RNA, 39 nt, synthetic construct
  source 1..39: mol_type = other RNA
aaaaaaaaaaaaaaaaaaaaaaaaaaaaaaaaataaata

SEQ ID NO: 7867 - RNA, 39 nt, synthetic construct
  source 1..39: mol_type = other RNA
aaaaaaaaaaaaaaaaaaaaaaatataaatataaatata

SEQ ID NO: 7868 - RNA, 39 nt, synthetic construct
  source 1..39: mol_type = other RNA
aaaaaaaaaaaaaaaaaaaaaaaaaaaaataaataaata

SEQ ID NO: 7869 - RNA, 39 nt, synthetic construct
  source 1..39: mol_type = other RNA
aaaaaaaaaaaaaaaaaaatataaatataaataaatata

SEQ ID NO: 7870 - RNA, 39 nt, synthetic construct
  source 1..39: mol_type = other RNA
aaaaaaaaaaaaaaaaaaataaatataaatataaatata

SEQ ID NO: 7871 - RNA, 39 nt, synthetic construct
  source 1..39: mol_type = other RNA
aaaaaaaaaaaaaaaaaaatataaataaatataaatata

SEQ ID NO: 7872 - RNA, 39 nt, synthetic construct
  source 1..39: mol_type = other RNA
aaaaaaaaaaaaaaaaaaaaaaaaataaataaataaata

SEQ ID NO: 7873 - RNA, 39 nt, synthetic construct
  source 1..39: mol_type = other RNA
aaaaaaaaaaaaaaataaatataaatataaataaatata

SEQ ID NO: 7874 - RNA, 39 nt, synthetic construct
  source 1..39: mol_type = other RNA
aaaaaaaaaaaaaaataaatataaataaatataaatata

SEQ ID NO: 7875 - RNA, 39 nt, synthetic construct
  source 1..39: mol_type = other RNA
aaaaaaaaaaaaaaatataaataaatataaataaatata

SEQ ID NO: 7876 - RNA, 39 nt, synthetic construct
  source 1..39: mol_type = other RNA
aaaaaaaaaaaaaaatataaataaataaatataaatata

SEQ ID NO: 7877 - RNA, 39 nt, synthetic construct
  source 1..39: mol_type = other RNA
aaaaaaaaaaaaaaatataaatataaataaataaatata

SEQ ID NO: 7878 - RNA, 39 nt, synthetic construct
  source 1..39: mol_type = other RNA
aaaaaaaaaaaaaaataaataaatataaatataaatata

SEQ ID NO: 7879 - RNA, 39 nt, synthetic construct
  source 1..39: mol_type = other RNA
aaaaaaaaaaaaaaaaaaaaataaataaataaataaata

SEQ ID NO: 7880 - RNA, 39 nt, synthetic construct
  source 1..39: mol_type = other RNA
aaaaaaaaaaataaataaatataaataaatataaatata

SEQ ID NO: 7881 - RNA, 39 nt, synthetic construct
  source 1..39: mol_type = other RNA
aaaaaaaaaaataaataaatataaatataaataaatata

SEQ ID NO: 7882 - RNA, 39 nt, synthetic construct
  source 1..39: mol_type = other RNA
aaaaaaaaaaataaatataaataaataaatataaatata

SEQ ID NO: 7883 - RNA, 39 nt, synthetic construct
  source 1..39: mol_type = other RNA
aaaaaaaaaaataaataaataaatataaatataaatata

SEQ ID NO: 7884 - RNA, 39 nt, synthetic construct
  source 1..39: mol_type = other RNA
aaaaaaaaaaataaatataaataaatataaataaatata

SEQ ID NO: 7885 - RNA, 39 nt, synthetic construct
  source 1..39: mol_type = other RNA
aaaaaaaaaaataaatataaatataaataaataaatata

SEQ ID NO: 7886 - RNA, 39 nt, synthetic construct
  source 1..39: mol_type = other RNA
aaaaaaaaaaatataaatataaataaataaataaatata

SEQ ID NO: 7887 - RNA, 39 nt, synthetic construct
  source 1..39: mol_type = other RNA
aaatataaaaaaaaaaaaaaaaaaaaaaaaaaaaatata

SEQ ID NO: 7888 - RNA, 39 nt, synthetic construct
  source 1..39: mol_type = other RNA
aaaaaaaaaaaaaaaaataaataaataaataaataaata

SEQ ID NO: 7889 - RNA, 39 nt, synthetic construct
  source 1..39: mol_type = other RNA
aaaaaaatataaataaatataaataaataaataaatata

SEQ ID NO: 7890 - RNA, 39 nt, synthetic construct
  source 1..39: mol_type = other RNA
aaaaaaataaataaatataaatataaataaataaatata

SEQ ID NO: 7891 - RNA, 39 nt, synthetic construct
  source 1..39: mol_type = other RNA
aaaaaaataaataaataaatataaatataaataaatata

SEQ ID NO: 7892 - RNA, 39 nt, synthetic construct
  source 1..39: mol_type = other RNA
aaaaaaataaataaatataaataaatataaataaatata

SEQ ID NO: 7893 - RNA, 39 nt, synthetic construct
  source 1..39: mol_type = other RNA
aaaaaaataaataaataaatataaataaatataaatata

SEQ ID NO: 7894 - RNA, 39 nt, synthetic construct
  source 1..39: mol_type = other RNA
aaaaaaataaataaatataaataaataaatataaatata

SEQ ID NO: 7895 - RNA, 39 nt, synthetic construct
  source 1..39: mol_type = other RNA
aaaaaaatataaataaataaatataaataaataaatata

SEQ ID NO: 7896 - RNA, 39 nt, synthetic construct
  source 1..39: mol_type = other RNA
aaatataaataaaaaaaaaaaaaaaaaaaaaaaaatata

SEQ ID NO: 7897 - RNA, 39 nt, synthetic construct
  source 1..39: mol_type = other RNA
aaataaatataaaaaaaaaaaaaaaaaaaaaaaaatata

SEQ ID NO: 7898 - RNA, 39 nt, synthetic construct
  source 1..39: mol_type = other RNA
aaataaaaaaaaaaaaaaaaaaaaaaaaatataaatata

SEQ ID NO: 7899 - RNA, 39 nt, synthetic construct
  source 1..39: mol_type = other RNA
aaatataaaaaaaaaaaaaaaaaaaaaaaaataaatata

SEQ ID NO: 7900 - RNA, 39 nt, synthetic construct
  source 1..39: mol_type = other RNA
aaataaatatataaataaataaataaataaataaataaa

SEQ ID NO: 7901 - RNA, 39 nt, synthetic construct
  source 1..39: mol_type = other RNA
aaataaataaataaataaataaataaataaatatataaa

SEQ ID NO: 7902 - RNA, 39 nt, synthetic construct
  source 1..39: mol_type = other RNA
aaataaataaataaatatataaataaataaataaataaa

SEQ ID NO: 7903 - RNA, 39 nt, synthetic construct
  source 1..39: mol_type = other RNA
aaataaataaatatataaataaataaataaataaataaa

SEQ ID NO: 7904 - RNA, 39 nt, synthetic construct
  source 1..39: mol_type = other RNA
aaataaataaataaataaataaatatataaataaataaa

SEQ ID NO: 7905 - RNA, 39 nt, synthetic construct
  source 1..39: mol_type = other RNA
aaataaataaataaataaatatataaataaataaataaa

SEQ ID NO: 7906 - RNA, 39 nt, synthetic construct
  source 1..39: mol_type = other RNA
aaaaaaaaaaaaataaataaataaataaataaataaata

SEQ ID NO: 7907 - RNA, 39 nt, synthetic construct
  source 1..39: mol_type = other RNA
aaatataaataaataaaaaaaaaaaaaaaaaaaaatata

SEQ ID NO: 7908 - RNA, 39 nt, synthetic construct
  source 1..39: mol_type = other RNA
aaataaatataaataaaaaaaaaaaaaaaaaaaaatata

SEQ ID NO: 7909 - RNA, 39 nt, synthetic construct
  source 1..39: mol_type = other RNA
aaataaataaaaaaaaaaaaaaaaaaaaatataaatata

SEQ ID NO: 7910 - RNA, 39 nt, synthetic construct
  source 1..39: mol_type = other RNA
aaataaaaaaaaaaaaaaaaaaaaataaatataaatata

SEQ ID NO: 7911 - RNA, 39 nt, synthetic construct
  source 1..39: mol_type = other RNA
aaatataaataaaaaaaaaaaaaaaaaaaaataaatata

SEQ ID NO: 7912 - RNA, 39 nt, synthetic construct
  source 1..39: mol_type = other RNA
aaataaaaaaaaaaaaaaaaaaaaatataaataaatata

SEQ ID NO: 7913 - RNA, 39 nt, synthetic construct
  source 1..39: mol_type = other RNA
aaatataaaaaaaaaaaaaaaaaaaaataaataaatata

SEQ ID NO: 7914 - RNA, 39 nt, synthetic construct
  source 1..39: mol_type = other RNA
aaataaatataaaaaaaaaaaaaaaaaaaaataaatata

SEQ ID NO: 7915 - RNA, 39 nt, synthetic construct
  source 1..39: mol_type = other RNA
aaataaataaatataaaaaaaaaaaaaaaaaaaaatata

SEQ ID NO: 7916 - RNA, 39 nt, synthetic construct
  source 1..39: mol_type = other RNA
aaaaaaaaataaataaataaataaataaataaataaata

SEQ ID NO: 7917 - RNA, 39 nt, synthetic construct
  source 1..39: mol_type = other RNA
aaataaatataaataaaaaaaaaaaaaaaaataaatata

SEQ ID NO: 7918 - RNA, 39 nt, synthetic construct
  source 1..39: mol_type = other RNA
aaataaatataaataaataaaaaaaaaaaaaaaaatata

SEQ ID NO: 7919 - RNA, 39 nt, synthetic construct
  source 1..39: mol_type = other RNA
aaatataaataaataaataaaaaaaaaaaaaaaaatata

SEQ ID NO: 7920 - RNA, 39 nt, synthetic construct
  source 1..39: mol_type = other RNA
aaataaataaaaaaaaaaaaaaaaataaatataaatata

SEQ ID NO: 7921 - RNA, 39 nt, synthetic construct
  source 1..39: mol_type = other RNA
aaataaaaaaaaaaaaaaaaataaatataaataaatata

SEQ ID NO: 7922 - RNA, 39 nt, synthetic construct
  source 1..39: mol_type = other RNA
aaataaaaaaaaaaaaaaaaatataaataaataaatata

SEQ ID NO: 7923 - RNA, 39 nt, synthetic construct
  source 1..39: mol_type = other RNA
aaataaataaataaatataaaaaaaaaaaaaaaaatata

SEQ ID NO: 7924 - RNA, 39 nt, synthetic construct
  source 1..39: mol_type = other RNA
aaataaataaaaaaaaaaaaaaaaatataaataaatata

SEQ ID NO: 7925 - RNA, 39 nt, synthetic construct
  source 1..39: mol_type = other RNA
aaataaaaaaaaaaaaaaaaataaataaatataaatata

SEQ ID NO: 7926 - RNA, 39 nt, synthetic construct
  source 1..39: mol_type = other RNA
aaatataaaaaaaaaaaaaaaaataaataaataaatata

SEQ ID NO: 7927 - RNA, 39 nt, synthetic construct
  source 1..39: mol_type = other RNA
aaatataaataaaaaaaaaaaaaaaaataaataaatata

SEQ ID NO: 7928 - RNA, 39 nt, synthetic construct
  source 1..39: mol_type = other RNA
aaataaatataaaaaaaaaaaaaaaaataaataaatata

SEQ ID NO: 7929 - RNA, 39 nt, synthetic construct
  source 1..39: mol_type = other RNA
aaataaataaataaaaaaaaaaaaaaaaatataaatata

SEQ ID NO: 7930 - RNA, 39 nt, synthetic construct
  source 1..39: mol_type = other RNA
aaataaataaatataaataaaaaaaaaaaaaaaaatata

SEQ ID NO: 7931 - RNA, 40 nt, synthetic construct
  source 1..40: mol_type = other RNA
aaaaaaaaaaaaaaaaaaaaaaaaaaaaaaaaaaaatata

SEQ ID NO: 7932 - RNA, 40 nt, synthetic construct
  source 1..40: mol_type = other RNA
aaaaaaaaaaaaaaaaaaaaaaaaaaaaaaaataaatata

SEQ ID NO: 7933 - RNA, 40 nt, synthetic construct
  source 1..40: mol_type = other RNA
aaaaaaaaaaaaaaaaaaaaaaaaaaaataaataaatata

SEQ ID NO: 7934 - RNA, 40 nt, synthetic construct
  source 1..40: mol_type = other RNA
aaaaaaaaaaaaaaaaaaaaaaaataaataaataaatata

SEQ ID NO: 7935 - RNA, 40 nt, synthetic construct
  source 1..40: mol_type = other RNA
aaaaaaaaaaaaaaaaaaaataaataaataaataaatata

SEQ ID NO: 7936 - RNA, 40 nt, synthetic construct
  source 1..40: mol_type = other RNA
aaaaaaaaaaaaaaaataaataaataaataaataaatata

SEQ ID NO: 7937 - RNA, 40 nt, synthetic construct
  source 1..40: mol_type = other RNA
aaaaaaaaaaaataaataaataaataaataaataaatata

SEQ ID NO: 7938 - RNA, 40 nt, synthetic construct
  source 1..40: mol_type = other RNA
aaaaaaaataaataaataaataaataaataaataaatata

SEQ ID NO: 7939 - RNA, 40 nt, synthetic construct
  source 1..40: mol_type = other RNA
aaaataaataaataaataaataaataaataaataaatata

SEQ ID NO: 7940 - RNA, 40 nt, synthetic construct
  source 1..40: mol_type = other RNA
aaatataaataaataaataaataaataaataaataaataa

SEQ ID NO: 7941 - RNA, 40 nt, synthetic construct
  source 1..40: mol_type = other RNA
aaataaatataaataaataaataaataaataaataaataa

SEQ ID NO: 7942 - RNA, 40 nt, synthetic construct
  source 1..40: mol_type = other RNA
aaataaataaataaataaataaataaataaatataaataa

SEQ ID NO: 7943 - RNA, 40 nt, synthetic construct
  source 1..40: mol_type = other RNA
aaataaataaatataaataaataaataaataaataaataa

SEQ ID NO: 7944 - RNA, 40 nt, synthetic construct
  source 1..40: mol_type = other RNA
aaaaaaaaaaaaaaaaaaaaaaaaaaaaaatataaatata

SEQ ID NO: 7945 - RNA, 40 nt, synthetic construct
  source 1..40: mol_type = other RNA
aaaaaaaaaaaaaaaaaaaaaaaaaataaatataaatata

SEQ ID NO: 7946 - RNA, 40 nt, synthetic construct
  source 1..40: mol_type = other RNA
aaaaaaaaaaaaaaaaaaaaaaaaaatataaataaatata

SEQ ID NO: 7947 - RNA, 40 nt, synthetic construct
  source 1..40: mol_type = other RNA
aaaaaaaaaaaaaaaaaaaaaataaataaatataaatata

SEQ ID NO: 7948 - RNA, 40 nt, synthetic construct
  source 1..40: mol_type = other RNA
aaaaaaaaaaaaaaaaaaaaaataaatataaataaatata

SEQ ID NO: 7949 - RNA, 40 nt, synthetic construct
  source 1..40: mol_type = other RNA
aaaaaaaaaaaaaaaaaaaaaatataaataaataaatata

SEQ ID NO: 7950 - RNA, 40 nt, synthetic construct
  source 1..40: mol_type = other RNA
aaaaaaaaaaaaaaaaaataaataaataaatataaatata

SEQ ID NO: 7951 - RNA, 40 nt, synthetic construct
  source 1..40: mol_type = other RNA
aaaaaaaaaaaaaaaaaataaatataaataaataaatata

SEQ ID NO: 7952 - RNA, 40 nt, synthetic construct
  source 1..40: mol_type = other RNA
aaaaaaaaaaaaaaaaaataaataaatataaataaatata

SEQ ID NO: 7953 - RNA, 40 nt, synthetic construct
  source 1..40: mol_type = other RNA
aaaaaaaaaaaaaaaaaatataaataaataaataaatata

SEQ ID NO: 7954 - RNA, 40 nt, synthetic construct
  source 1..40: mol_type = other RNA
aaaaaaaaaaaaaatataaataaataaataaataaatata

SEQ ID NO: 7955 - RNA, 40 nt, synthetic construct
  source 1..40: mol_type = other RNA
aaaaaaaaaaaaaataaataaataaataaatataaatata

SEQ ID NO: 7956 - RNA, 40 nt, synthetic construct
  source 1..40: mol_type = other RNA
aaaaaaaaaaaaaataaataaatataaataaataaatata

SEQ ID NO: 7957 - RNA, 40 nt, synthetic construct
  source 1..40: mol_type = other RNA
aaaaaaaaaaaaaataaataaataaatataaataaatata

SEQ ID NO: 7958 - RNA, 40 nt, synthetic construct
  source 1..40: mol_type = other RNA
aaaaaaaaaaaaaataaatataaataaataaataaatata

SEQ ID NO: 7959 - RNA, 40 nt, synthetic construct
  source 1..40: mol_type = other RNA
aaatataaataaataaataaataaataaataaataaatat

SEQ ID NO: 7960 - RNA, 40 nt, synthetic construct
  source 1..40: mol_type = other RNA
aaataaatataaataaataaataaataaataaataaatat

SEQ ID NO: 7961 - RNA, 40 nt, synthetic construct
  source 1..40: mol_type = other RNA
aaataaataaataaataaataaataaataaatataaatat

SEQ ID NO: 7962 - RNA, 40 nt, synthetic construct
  source 1..40: mol_type = other RNA
aaataaaaaaaaaaaaaaaaaaaaaaaaaaaaaaaatata

SEQ ID NO: 7963 - RNA, 40 nt, synthetic construct
  source 1..40: mol_type = other RNA
aaaaaaaaaataaatataaataaataaataaataaatata

SEQ ID NO: 7964 - RNA, 40 nt, synthetic construct
  source 1..40: mol_type = other RNA
aaaaaaaaaatataaataaataaataaataaataaatata

SEQ ID NO: 7965 - RNA, 40 nt, synthetic construct
  source 1..40: mol_type = other RNA
aaaaaaaaaataaataaataaataaataaatataaatata

SEQ ID NO: 7966 - RNA, 40 nt, synthetic construct
  source 1..40: mol_type = other RNA
aaaaaaaaaataaataaataaatataaataaataaatata

SEQ ID NO: 7967 - RNA, 40 nt, synthetic construct
  source 1..40: mol_type = other RNA
aaaaaaaaaataaataaataaataaatataaataaatata

SEQ ID NO: 7968 - RNA, 40 nt, synthetic construct
  source 1..40: mol_type = other RNA
aaaaaaaaaataaataaatataaataaataaataaatata

SEQ ID NO: 7969 - RNA, 40 nt, synthetic construct
  source 1..40: mol_type = other RNA
aaataaataaaaaaaaaaaaaaaaaaaaaaaaaaaatata

SEQ ID NO: 7970 - RNA, 40 nt, synthetic construct
  source 1..40: mol_type = other RNA
aaataaaaaaaaaaaaaaaaaaaaaaaaaaaataaatata

SEQ ID NO: 7971 - RNA, 40 nt, synthetic construct
  source 1..40: mol_type = other RNA
aaaaaataaataaataaataaatataaataaataaatata

SEQ ID NO: 7972 - RNA, 40 nt, synthetic construct
  source 1..40: mol_type = other RNA
aaaaaataaataaataaataaataaatataaataaatata

SEQ ID NO: 7973 - RNA, 40 nt, synthetic construct
  source 1..40: mol_type = other RNA
aaaaaataaataaataaatataaataaataaataaatata

SEQ ID NO: 7974 - RNA, 40 nt, synthetic construct
  source 1..40: mol_type = other RNA
aaaaaataaataaataaataaataaataaatataaatata

SEQ ID NO: 7975 - RNA, 40 nt, synthetic construct
  source 1..40: mol_type = other RNA
aaaaaataaatataaataaataaataaataaataaatata

SEQ ID NO: 7976 - RNA, 40 nt, synthetic construct
  source 1..40: mol_type = other RNA
aaaaaatataaataaataaataaataaataaataaatata

SEQ ID NO: 7977 - RNA, 40 nt, synthetic construct
  source 1..40: mol_type = other RNA
aaaaaataaataaatataaataaataaataaataaatata

SEQ ID NO: 7978 - RNA, 40 nt, synthetic construct
  source 1..40: mol_type = other RNA
aaataaataaataaaaaaaaaaaaaaaaaaaaaaaatata

SEQ ID NO: 7979 - RNA, 40 nt, synthetic construct
  source 1..40: mol_type = other RNA
aaataaataaaaaaaaaaaaaaaaaaaaaaaataaatata

SEQ ID NO: 7980 - RNA, 40 nt, synthetic construct
  source 1..40: mol_type = other RNA
aaataaaaaaaaaaaaaaaaaaaaaaaataaataaatata

SEQ ID NO: 7981 - RNA, 40 nt, synthetic construct
  source 1..40: mol_type = other RNA
aaataaataaataaataaaaaaaaaaaaaaaaaaaatata

SEQ ID NO: 7982 - RNA, 40 nt, synthetic construct
  source 1..40: mol_type = other RNA
aaataaataaataaaaaaaaaaaaaaaaaaaataaatata

SEQ ID NO: 7983 - RNA, 40 nt, synthetic construct
  source 1..40: mol_type = other RNA
aaataaaaaaaaaaaaaaaaaaaataaataaataaatata

SEQ ID NO: 7984 - RNA, 40 nt, synthetic construct
  source 1..40: mol_type = other RNA
aaataaataaaaaaaaaaaaaaaaaaaataaataaatata

SEQ ID NO: 7985 - RNA, 40 nt, synthetic construct
  source 1..40: mol_type = other RNA
aaaaaaaaaaaaaaaaaaaaaaaaaaaaaaaaaatatata

SEQ ID NO: 7986 - RNA, 40 nt, synthetic construct
  source 1..40: mol_type = other RNA
aaataaataaataaataaataaaaaaaaaaaaaaaatata

SEQ ID NO: 7987 - RNA, 40 nt, synthetic construct
  source 1..40: mol_type = other RNA
aaaaaaaaaaaaaaaaaaaaaaaaaaaaaataaatatata

SEQ ID NO: 7988 - RNA, 40 nt, synthetic construct
  source 1..40: mol_type = other RNA
aaataaataaataaataaaaaaaaaaaaaaaataaatata

SEQ ID NO: 7989 - RNA, 40 nt, synthetic construct
  source 1..40: mol_type = other RNA
aaataaataaataaaaaaaaaaaaaaaataaataaatata

SEQ ID NO: 7990 - RNA, 40 nt, synthetic construct
  source 1..40: mol_type = other RNA
aaataaataaaaaaaaaaaaaaaataaataaataaatata

SEQ ID NO: 7991 - RNA, 40 nt, synthetic construct
  source 1..40: mol_type = other RNA
aaataaaaaaaaaaaaaaaataaataaataaataaatata

SEQ ID NO: 7992 - RNA, 40 nt, synthetic construct
  source 1..40: mol_type = other RNA
aaaaaaaaaaaaaaaaaaaaaaaaaaaaaaaaaaaaataa

SEQ ID NO: 7993 - RNA, 40 nt, synthetic construct
  source 1..40: mol_type = other RNA
aaataaataaataaataaataaataaaaaaaaaaaatata

SEQ ID NO: 7994 - RNA, 40 nt, synthetic construct
  source 1..40: mol_type = other RNA
aaataaaaaaaaaaaataaataaataaataaataaatata

SEQ ID NO: 7995 - RNA, 40 nt, synthetic construct
  source 1..40: mol_type = other RNA
aaataaataaataaataaaaaaaaaaaataaataaatata

SEQ ID NO: 7996 - RNA, 40 nt, synthetic construct
  source 1..40: mol_type = other RNA
aaataaataaataaaaaaaaaaaataaataaataaatata

SEQ ID NO: 7997 - RNA, 40 nt, synthetic construct
  source 1..40: mol_type = other RNA
aaataaataaataaataaataaaaaaaaaaaataaatata

SEQ ID NO: 7998 - RNA, 40 nt, synthetic construct
  source 1..40: mol_type = other RNA
aaataaataaaaaaaaaaaataaataaataaataaatata

SEQ ID NO: 7999 - RNA, 40 nt, synthetic construct
  source 1..40: mol_type = other RNA
aaaaaaaaaaaaaaaaaaaaaaaaaataaataaatatata

SEQ ID NO: 8000 - RNA, 40 nt, synthetic construct
  source 1..40: mol_type = other RNA
aaaaaaaaaaaaaaaaaaaaaaaaaaaaaaaaataaataa

SEQ ID NO: 8001 - RNA, 40 nt, synthetic construct
  source 1..40: mol_type = other RNA
aaataaataaataaataaataaataaataaaaaaaatata

SEQ ID NO: 8002 - RNA, 40 nt, synthetic construct
  source 1..40: mol_type = other RNA
aaaaaaaaaaaaaaaaaaaaaataaataaataaatatata

SEQ ID NO: 8003 - RNA, 40 nt, synthetic construct
  source 1..40: mol_type = other RNA
aaataaataaataaataaaaaaaataaataaataaatata

SEQ ID NO: 8004 - RNA, 40 nt, synthetic construct
  source 1..40: mol_type = other RNA
aaataaataaataaaaaaaataaataaataaataaatata

SEQ ID NO: 8005 - RNA, 40 nt, synthetic construct
  source 1..40: mol_type = other RNA
aaataaataaaaaaaataaataaataaataaataaatata

SEQ ID NO: 8006 - RNA, 40 nt, synthetic construct
  source 1..40: mol_type = other RNA
aaataaaaaaaataaataaataaataaataaataaatata

SEQ ID NO: 8007 - RNA, 40 nt, synthetic construct
  source 1..40: mol_type = other RNA
aaaaaaaaaaaaaaaaaaaaaaaaaaaaataaataaataa

SEQ ID NO: 8008 - RNA, 40 nt, synthetic construct
  source 1..40: mol_type = other RNA
aaataaataaataaaataaataaataaataaataaatata

SEQ ID NO: 8009 - RNA, 40 nt, synthetic construct
  source 1..40: mol_type = other RNA
aaataaataaataaataaaataaataaataaataaatata

SEQ ID NO: 8010 - RNA, 40 nt, synthetic construct
  source 1..40: mol_type = other RNA
aaataaataaaataaataaataaataaataaataaatata

SEQ ID NO: 8011 - RNA, 40 nt, synthetic construct
  source 1..40: mol_type = other RNA
aaaaaaaaaaaaaaaaaataaataaataaataaatatata

SEQ ID NO: 8012 - RNA, 40 nt, synthetic construct
  source 1..40: mol_type = other RNA
aaaaaaaaaaaaaaaaaaaaaaaaaaaaaaaaaaaataaa

SEQ ID NO: 8013 - RNA, 40 nt, synthetic construct
  source 1..40: mol_type = other RNA
aaaaaaaaaaaaaaaaaaaaaaaaataaataaataaataa

SEQ ID NO: 8014 - RNA, 40 nt, synthetic construct
  source 1..40: mol_type = other RNA
aaaaaaaaaaaaaataaataaataaataaataaatatata

SEQ ID NO: 8015 - RNA, 40 nt, synthetic construct
  source 1..40: mol_type = other RNA
aaaaaaaaaaaaaaaaaaaaaaaaaaaaaaaataaataaa

SEQ ID NO: 8016 - RNA, 40 nt, synthetic construct
  source 1..40: mol_type = other RNA
aaaaaaaaaaaaaaaaaaaaataaataaataaataaataa

SEQ ID NO: 8017 - RNA, 40 nt, synthetic construct
  source 1..40: mol_type = other RNA
aaaaaaaaaataaataaataaataaataaataaatatata

SEQ ID NO: 8018 - RNA, 40 nt, synthetic construct
  source 1..40: mol_type = other RNA
aaaaaaaaaaaaaaaaaaaaaaaaaaaataaataaataaa

SEQ ID NO: 8019 - RNA, 40 nt, synthetic construct
  source 1..40: mol_type = other RNA
aaaaaaaaaaaaaaaaataaataaataaataaataaataa

SEQ ID NO: 8020 - RNA, 40 nt, synthetic construct
  source 1..40: mol_type = other RNA
aaaaaaaaaaaaaaaaaaaaaaaataaataaataaataaa

SEQ ID NO: 8021 - RNA, 40 nt, synthetic construct
  source 1..40: mol_type = other RNA
aaaaaaaaaaaaataaataaataaataaataaataaataa

SEQ ID NO: 8022 - RNA, 40 nt, synthetic construct
  source 1..40: mol_type = other RNA
aaaaaaaaaaaaaaaaaaaataaataaataaataaataaa

SEQ ID NO: 8023 - RNA, 40 nt, synthetic construct
  source 1..40: mol_type = other RNA
aaaaaaaaataaataaataaataaataaataaataaataa

SEQ ID NO: 8024 - RNA, 40 nt, synthetic construct
  source 1..40: mol_type = other RNA
aaaaaaaaaaaaaaaataaataaataaataaataaataaa

SEQ ID NO: 8025 - RNA, 40 nt, synthetic construct
  source 1..40: mol_type = other RNA
aaaaataaataaataaataaataaataaataaataaataa

SEQ ID NO: 8026 - RNA, 40 nt, synthetic construct
  source 1..40: mol_type = other RNA
aaaaaaaaaaaataaataaataaataaataaataaataaa

SEQ ID NO: 8027 - RNA, 40 nt, synthetic construct
  source 1..40: mol_type = other RNA
aaaaaaaaaaaaaaaaaaaaaaaaaaaaaaaaaaaaatat

SEQ ID NO: 8028 - RNA, 40 nt, synthetic construct
  source 1..40: mol_type = other RNA
aaaaaaaataaataaataaataaataaataaataaataaa

SEQ ID NO: 8029 - RNA, 40 nt, synthetic construct
  source 1..40: mol_type = other RNA
aaaaaaaaaaaaaaaaaaaaaaaaaaaaaaaaataaatat

SEQ ID NO: 8030 - RNA, 40 nt, synthetic construct
  source 1..40: mol_type = other RNA
aaaataaataaataaataaataaataaataaataaataaa

SEQ ID NO: 8031 - RNA, 41 nt, synthetic construct
  source 1..41: mol_type = other RNA
aaataaataaataaatataaataaataaataaataaatata

SEQ ID NO: 8032 - RNA, 41 nt, synthetic construct
  source 1..41: mol_type = other RNA
aaataaataaataaataaatataaataaataaataaatata

SEQ ID NO: 8033 - RNA, 41 nt, synthetic construct
  source 1..41: mol_type = other RNA
aaaaaaaaaaaaaaaaaaaaaaaaaaaaaaaaaaaaatata

SEQ ID NO: 8034 - RNA, 41 nt, synthetic construct
  source 1..41: mol_type = other RNA
aaaaaaaaaaaaaaaaaaaaaaaaaaaaaaaaataaatata

SEQ ID NO: 8035 - RNA, 41 nt, synthetic construct
  source 1..41: mol_type = other RNA
aaaaaaaaaaaaaaaaaaaaaaaaaaaaataaataaatata

SEQ ID NO: 8036 - RNA, 41 nt, synthetic construct
  source 1..41: mol_type = other RNA
aaaaaaaaaaaaaaaaaaaaaaaaataaataaataaatata

SEQ ID NO: 8037 - RNA, 41 nt, synthetic construct
  source 1..41: mol_type = other RNA
aaaaaaaaaaaaaaaaaaaaataaataaataaataaatata

SEQ ID NO: 8038 - RNA, 41 nt, synthetic construct
  source 1..41: mol_type = other RNA
aaaaaaaaaaaaaaaaataaataaataaataaataaatata

SEQ ID NO: 8039 - RNA, 41 nt, synthetic construct
  source 1..41: mol_type = other RNA
aaaaaaaaaaaaataaataaataaataaataaataaatata

SEQ ID NO: 8040 - RNA, 41 nt, synthetic construct
  source 1..41: mol_type = other RNA
aaaaaaaaataaataaataaataaataaataaataaatata

SEQ ID NO: 8041 - RNA, 41 nt, synthetic construct
  source 1..41: mol_type = other RNA
aaaaataaataaataaataaataaataaataaataaatata

SEQ ID NO: 8042 - RNA, 41 nt, synthetic construct
  source 1..41: mol_type = other RNA
aaataaataaataaatataaataaataaataaataaataaa

SEQ ID NO: 8043 - RNA, 41 nt, synthetic construct
  source 1..41: mol_type = other RNA
aaataaataaataaataaataaatataaataaataaataaa

SEQ ID NO: 8044 - RNA, 41 nt, synthetic construct
  source 1..41: mol_type = other RNA
aaataaataaataaataaataaataaataaatataaataaa

SEQ ID NO: 8045 - RNA, 41 nt, synthetic construct
  source 1..41: mol_type = other RNA
aaataaataaataaataaataaataaataaataaatataaa

SEQ ID NO: 8046 - RNA, 41 nt, synthetic construct
  source 1..41: mol_type = other RNA
aaaaaaaaaaaaaaaaaaaaaaaaaaaaaaatataaatata

SEQ ID NO: 8047 - RNA, 41 nt, synthetic construct
  source 1..41: mol_type = other RNA
aaaaaaaaaaaaaaaaaaaaaaaaaaataaatataaatata

SEQ ID NO: 8048 - RNA, 41 nt, synthetic construct
  source 1..41: mol_type = other RNA
aaaaaaaaaaaaaaaaaaaaaaaaaaatataaataaatata

SEQ ID NO: 8049 - RNA, 41 nt, synthetic construct
  source 1..41: mol_type = other RNA
aaaaaaaaaaaaaaaaaaaaaaataaataaatataaatata

SEQ ID NO: 8050 - RNA, 41 nt, synthetic construct
  source 1..41: mol_type = other RNA
aaaaaaaaaaaaaaaaaaaaaaatataaataaataaatata

SEQ ID NO: 8051 - RNA, 41 nt, synthetic construct
  source 1..41: mol_type = other RNA
aaaaaaaaaaaaaaaaaaaaaaataaatataaataaatata

SEQ ID NO: 8052 - RNA, 41 nt, synthetic construct
  source 1..41: mol_type = other RNA
aaaaaaaaaaaaaaaaaaatataaataaataaataaatata

SEQ ID NO: 8053 - RNA, 41 nt, synthetic construct
  source 1..41: mol_type = other RNA
aaaaaaaaaaaaaaaaaaataaataaataaatataaatata

SEQ ID NO: 8054 - RNA, 41 nt, synthetic construct
  source 1..41: mol_type = other RNA
aaaaaaaaaaaaaaaaaaataaataaatataaataaatata

SEQ ID NO: 8055 - RNA, 41 nt, synthetic construct
  source 1..41: mol_type = other RNA
aaaaaaaaaaaaaaaaaaataaatataaataaataaatata

SEQ ID NO: 8056 - RNA, 41 nt, synthetic construct
  source 1..41: mol_type = other RNA
aaaaaaaaaaaaaaatataaataaataaataaataaatata

SEQ ID NO: 8057 - RNA, 41 nt, synthetic construct
  source 1..41: mol_type = other RNA
aaaaaaaaaaaaaaataaataaataaataaatataaatata

SEQ ID NO: 8058 - RNA, 41 nt, synthetic construct
  source 1..41: mol_type = other RNA
aaaaaaaaaaaaaaataaataaataaatataaataaatata

SEQ ID NO: 8059 - RNA, 41 nt, synthetic construct
  source 1..41: mol_type = other RNA
aaaaaaaaaaaaaaataaataaatataaataaataaatata

SEQ ID NO: 8060 - RNA, 41 nt, synthetic construct
  source 1..41: mol_type = other RNA
aaaaaaaaaaaaaaataaatataaataaataaataaatata

SEQ ID NO: 8061 - RNA, 41 nt, synthetic construct
  source 1..41: mol_type = other RNA
aaataaaaaaaaaaaaaaaaaaaaaaaaaaaaaaaaatata

SEQ ID NO: 8062 - RNA, 41 nt, synthetic construct
  source 1..41: mol_type = other RNA
aaaaaaaaaaataaataaataaatataaataaataaatata

SEQ ID NO: 8063 - RNA, 41 nt, synthetic construct
  source 1..41: mol_type = other RNA
aaaaaaaaaaataaataaatataaataaataaataaatata

SEQ ID NO: 8064 - RNA, 41 nt, synthetic construct
  source 1..41: mol_type = other RNA
aaaaaaaaaaataaataaataaataaatataaataaatata

SEQ ID NO: 8065 - RNA, 41 nt, synthetic construct
  source 1..41: mol_type = other RNA
aaaaaaaaaaataaataaataaataaataaatataaatata

SEQ ID NO: 8066 - RNA, 41 nt, synthetic construct
  source 1..41: mol_type = other RNA
aaaaaaaaaaatataaataaataaataaataaataaatata

SEQ ID NO: 8067 - RNA, 41 nt, synthetic construct
  source 1..41: mol_type = other RNA
aaataaataaaaaaaaaaaaaaaaaaaaaaaaaaaaatata

SEQ ID NO: 8068 - RNA, 41 nt, synthetic construct
  source 1..41: mol_type = other RNA
aaataaaaaaaaaaaaaaaaaaaaaaaaaaaaataaatata

SEQ ID NO: 8069 - RNA, 41 nt, synthetic construct
  source 1..41: mol_type = other RNA
aaaaaaataaataaatataaataaataaataaataaatata

SEQ ID NO: 8070 - RNA, 41 nt, synthetic construct
  source 1..41: mol_type = other RNA
aaaaaaataaataaataaataaataaataaatataaatata

SEQ ID NO: 8071 - RNA, 41 nt, synthetic construct
  source 1..41: mol_type = other RNA
aaataaataaataaaaaaaaaaaaaaaaaaaaaaaaatata

SEQ ID NO: 8072 - RNA, 41 nt, synthetic construct
  source 1..41: mol_type = other RNA
aaataaataaaaaaaaaaaaaaaaaaaaaaaaataaatata

SEQ ID NO: 8073 - RNA, 41 nt, synthetic construct
  source 1..41: mol_type = other RNA
aaataaaaaaaaaaaaaaaaaaaaaaaaataaataaatata

SEQ ID NO: 8074 - RNA, 41 nt, synthetic construct
  source 1..41: mol_type = other RNA
aaataaaaaaaaaaaaaaaaaaaaataaataaataaatata

SEQ ID NO: 8075 - RNA, 41 nt, synthetic construct
  source 1..41: mol_type = other RNA
aaataaataaataaataaaaaaaaaaaaaaaaaaaaatata

SEQ ID NO: 8076 - RNA, 41 nt, synthetic construct
  source 1..41: mol_type = other RNA
aaataaataaataaaaaaaaaaaaaaaaaaaaataaatata

SEQ ID NO: 8077 - RNA, 41 nt, synthetic construct
  source 1..41: mol_type = other RNA
aaataaataaaaaaaaaaaaaaaaaaaaataaataaatata

SEQ ID NO: 8078 - RNA, 41 nt, synthetic construct
  source 1..41: mol_type = other RNA
aaaaaaaaaaaaaaaaaaaaaaaaaaaaaaaaaaatatata

SEQ ID NO: 8079 - RNA, 41 nt, synthetic construct
  source 1..41: mol_type = other RNA
aaataaaaaaaaaaaaaaaaataaataaataaataaatata

SEQ ID NO: 8080 - RNA, 41 nt, synthetic construct
  source 1..41: mol_type = other RNA
aaataaataaaaaaaaaaaaaaaaataaataaataaatata

SEQ ID NO: 8081 - RNA, 41 nt, synthetic construct
  source 1..41: mol_type = other RNA
aaataaataaataaataaataaaaaaaaaaaaaaaaatata

SEQ ID NO: 8082 - RNA, 41 nt, synthetic construct
  source 1..41: mol_type = other RNA
aaataaataaataaataaaaaaaaaaaaaaaaataaatata

SEQ ID NO: 8083 - RNA, 41 nt, synthetic construct
  source 1..41: mol_type = other RNA
aaataaataaataaaaaaaaaaaaaaaaataaataaatata

SEQ ID NO: 8084 - RNA, 41 nt, synthetic construct
  source 1..41: mol_type = other RNA
aaaaaaaaaaaaaaaaaaaaaaaaaaaaaaataaatatata

SEQ ID NO: 8085 - RNA, 41 nt, synthetic construct
  source 1..41: mol_type = other RNA
aaaaaaaaaaaaaaaaaaaaaaaaaaaaaaaaaaaaaataa

SEQ ID NO: 8086 - RNA, 41 nt, synthetic construct
  source 1..41: mol_type = other RNA
aaataaataaataaataaataaataaaaaaaaaaaaatata

SEQ ID NO: 8087 - RNA, 41 nt, synthetic construct
  source 1..41: mol_type = other RNA
aaataaataaaaaaaaaaaaataaataaataaataaatata

SEQ ID NO: 8088 - RNA, 41 nt, synthetic construct
  source 1..41: mol_type = other RNA
aaataaaaaaaaaaaaataaataaataaataaataaatata

SEQ ID NO: 8089 - RNA, 41 nt, synthetic construct
  source 1..41: mol_type = other RNA
aaataaataaataaataaaaaaaaaaaaataaataaatata

SEQ ID NO: 8090 - RNA, 41 nt, synthetic construct
  source 1..41: mol_type = other RNA
aaataaataaataaaaaaaaaaaaataaataaataaatata

SEQ ID NO: 8091 - RNA, 41 nt, synthetic construct
  source 1..41: mol_type = other RNA
aaataaataaataaataaataaaaaaaaaaaaataaatata

SEQ ID NO: 8092 - RNA, 41 nt, synthetic construct
  source 1..41: mol_type = other RNA
aaaaaaaaaaaaaaaaaaaaaaaaaaaaaaaaaataaataa

SEQ ID NO: 8093 - RNA, 41 nt, synthetic construct
  source 1..41: mol_type = other RNA
aaataaataaataaataaataaataaaaaaaaataaatata

SEQ ID NO: 8094 - RNA, 41 nt, synthetic construct
  source 1..41: mol_type = other RNA
aaataaataaaaaaaaataaataaataaataaataaatata

SEQ ID NO: 8095 - RNA, 41 nt, synthetic construct
  source 1..41: mol_type = other RNA
aaataaataaataaaaaaaaataaataaataaataaatata

SEQ ID NO: 8096 - RNA, 41 nt, synthetic construct
  source 1..41: mol_type = other RNA
aaataaataaataaataaaaaaaaataaataaataaatata

SEQ ID NO: 8097 - RNA, 41 nt, synthetic construct
  source 1..41: mol_type = other RNA
aaaaaaaaaaaaaaaaaaaaaaaaaaaaaataaataaataa

SEQ ID NO: 8098 - RNA, 41 nt, synthetic construct
  source 1..41: mol_type = other RNA
aaataaataaataaataaaaataaataaataaataaatata

SEQ ID NO: 8099 - RNA, 41 nt, synthetic construct
  source 1..41: mol_type = other RNA
aaaaaaaaaaaaaaaaaaataaataaataaataaatatata

SEQ ID NO: 8100 - RNA, 41 nt, synthetic construct
  source 1..41: mol_type = other RNA
aaataaataaataaaaataaataaataaataaataaatata

SEQ ID NO: 8101 - RNA, 41 nt, synthetic construct
  source 1..41: mol_type = other RNA
aaaaaaaaaaaaaaaaaaaaaaaaaaaaaaaaaaaaataaa

SEQ ID NO: 8102 - RNA, 41 nt, synthetic construct
  source 1..41: mol_type = other RNA
aaaaaaaaaaaaaaaaaaaaaaaaaataaataaataaataa

SEQ ID NO: 8103 - RNA, 41 nt, synthetic construct
  source 1..41: mol_type = other RNA
aaaaaaaaaaaaaaataaataaataaataaataaatatata

SEQ ID NO: 8104 - RNA, 41 nt, synthetic construct
  source 1..41: mol_type = other RNA
aaaaaaaaaaaaaaaaaaaaaaaaaaaaaaaaataaataaa

SEQ ID NO: 8105 - RNA, 41 nt, synthetic construct
  source 1..41: mol_type = other RNA
aaaaaaaaaaaaaaaaaaaaaataaataaataaataaataa

SEQ ID NO: 8106 - RNA, 41 nt, synthetic construct
  source 1..41: mol_type = other RNA
aaaaaaaaaaataaataaataaataaataaataaatatata

SEQ ID NO: 8107 - RNA, 41 nt, synthetic construct
  source 1..41: mol_type = other RNA
aaaaaaaaaaaaaaaaaaaaaaaaaaaaataaataaataaa

SEQ ID NO: 8108 - RNA, 41 nt, synthetic construct
  source 1..41: mol_type = other RNA
aaaaaaaaaaaaaaaaaataaataaataaataaataaataa

SEQ ID NO: 8109 - RNA, 41 nt, synthetic construct
  source 1..41: mol_type = other RNA
aaaaaaataaataaataaataaataaataaataaatatata

SEQ ID NO: 8110 - RNA, 41 nt, synthetic construct
  source 1..41: mol_type = other RNA
aaaaaaaaaaaaaaaaaaaaaaaaataaataaataaataaa

SEQ ID NO: 8111 - RNA, 41 nt, synthetic construct
  source 1..41: mol_type = other RNA
aaaaaaaaaaaaaataaataaataaataaataaataaataa

SEQ ID NO: 8112 - RNA, 41 nt, synthetic construct
  source 1..41: mol_type = other RNA
aaaaaaaaaaaaaaaaaaaaataaataaataaataaataaa

SEQ ID NO: 8113 - RNA, 41 nt, synthetic construct
  source 1..41: mol_type = other RNA
aaaaaaaaaataaataaataaataaataaataaataaataa

SEQ ID NO: 8114 - RNA, 41 nt, synthetic construct
  source 1..41: mol_type = other RNA
aaaaaaaaaaaaaaaaataaataaataaataaataaataaa

SEQ ID NO: 8115 - RNA, 41 nt, synthetic construct
  source 1..41: mol_type = other RNA
aaaaaataaataaataaataaataaataaataaataaataa

SEQ ID NO: 8116 - RNA, 41 nt, synthetic construct
  source 1..41: mol_type = other RNA
aaatataaataaatataaataaataaataaatataaatata

SEQ ID NO: 8117 - RNA, 41 nt, synthetic construct
  source 1..41: mol_type = other RNA
aaatataaataaataaatataaatataaataaataaatata

SEQ ID NO: 8118 - RNA, 41 nt, synthetic construct
  source 1..41: mol_type = other RNA
aaatataaataaatataaataaatataaataaataaatata

SEQ ID NO: 8119 - RNA, 41 nt, synthetic construct
  source 1..41: mol_type = other RNA
aaatataaatataaataaataaatataaataaataaatata

SEQ ID NO: 8120 - RNA, 41 nt, synthetic construct
  source 1..41: mol_type = other RNA
aaatataaatataaataaatataaataaataaataaatata

SEQ ID NO: 8121 - RNA, 41 nt, synthetic construct
  source 1..41: mol_type = other RNA
aaataaatataaataaataaatataaatataaataaatata

SEQ ID NO: 8122 - RNA, 41 nt, synthetic construct
  source 1..41: mol_type = other RNA
aaatataaataaataaataaatataaatataaataaatata

SEQ ID NO: 8123 - RNA, 41 nt, synthetic construct
  source 1..41: mol_type = other RNA
aaataaatataaataaataaatataaataaatataaatata

SEQ ID NO: 8124 - RNA, 41 nt, synthetic construct
  source 1..41: mol_type = other RNA
aaatataaataaatataaataaataaatataaataaatata

SEQ ID NO: 8125 - RNA, 41 nt, synthetic construct
  source 1..41: mol_type = other RNA
aaataaatataaataaatataaataaataaatataaatata

SEQ ID NO: 8126 - RNA, 41 nt, synthetic construct
  source 1..41: mol_type = other RNA
aaataaatataaataaatataaataaatataaataaatata

SEQ ID NO: 8127 - RNA, 41 nt, synthetic construct
  source 1..41: mol_type = other RNA
aaatataaataaataaatataaataaatataaataaatata

SEQ ID NO: 8128 - RNA, 41 nt, synthetic construct
  source 1..41: mol_type = other RNA
aaatataaataaataaatataaataaataaatataaatata

SEQ ID NO: 8129 - RNA, 41 nt, synthetic construct
  source 1..41: mol_type = other RNA
aaaaaaaaaaaaataaataaataaataaataaataaataaa

SEQ ID NO: 8130 - RNA, 41 nt, synthetic construct
  source 1..41: mol_type = other RNA
aaaaaaaaaaaaaaaaaaaaaaaaaaaaaaaaaaaaaatat

SEQ ID NO: 8131 - RNA, 42 nt, synthetic construct
  source 1..42: mol_type = other RNA
aaataaataaataaataaataaataaataaataaataaataa

SEQ ID NO: 8132 - RNA, 42 nt, synthetic construct
  source 1..42: mol_type = other RNA
aaaaaaaaaaaaaaaaaaaaaaaaaaaaaaaaaaaaaatata

SEQ ID NO: 8133 - RNA, 42 nt, synthetic construct
  source 1..42: mol_type = other RNA
aaaaaaaaaaaaaaaaaaaaaaaaaaaaaaaaaataaatata

SEQ ID NO: 8134 - RNA, 42 nt, synthetic construct
  source 1..42: mol_type = other RNA
aaaaaaaaaaaaaaaaaaaaaaaaaaaaaataaataaatata

SEQ ID NO: 8135 - RNA, 42 nt, synthetic construct
  source 1..42: mol_type = other RNA
aaaaaaaaaaaaaaaaaaaaaaaaaataaataaataaatata

SEQ ID NO: 8136 - RNA, 42 nt, synthetic construct
  source 1..42: mol_type = other RNA
aaaaaaaaaaaaaaaaaaaaaataaataaataaataaatata

SEQ ID NO: 8137 - RNA, 42 nt, synthetic construct
  source 1..42: mol_type = other RNA
aaaaaaaaaaaaaataaataaataaataaataaataaatata

SEQ ID NO: 8138 - RNA, 42 nt, synthetic construct
  source 1..42: mol_type = other RNA
aaaaaaaaaataaataaataaataaataaataaataaatata

SEQ ID NO: 8139 - RNA, 42 nt, synthetic construct
  source 1..42: mol_type = other RNA
aaaaaaaaaaaaaaaaaaaaaaaaaaaaaaaatataaatata

SEQ ID NO: 8140 - RNA, 42 nt, synthetic construct
  source 1..42: mol_type = other RNA
aaaaaaaaaaaaaaaaaaaaaaaaaaaatataaataaatata

SEQ ID NO: 8141 - RNA, 42 nt, synthetic construct
  source 1..42: mol_type = other RNA
aaaaaaaaaaaaaaaaaaaaaaaaaaaataaatataaatata

SEQ ID NO: 8142 - RNA, 42 nt, synthetic construct
  source 1..42: mol_type = other RNA
aaaaaaaaaaaaaaaaaaaaaaaataaataaatataaatata

SEQ ID NO: 8143 - RNA, 42 nt, synthetic construct
  source 1..42: mol_type = other RNA
aaaaaaaaaaaaaaaaaaaaaaaatataaataaataaatata

SEQ ID NO: 8144 - RNA, 42 nt, synthetic construct
  source 1..42: mol_type = other RNA
aaaaaaaaaaaaaaaaaaaataaataaataaatataaatata

SEQ ID NO: 8145 - RNA, 42 nt, synthetic construct
  source 1..42: mol_type = other RNA
aaaaaaaaaaaaaaaaaaaataaatataaataaataaatata

SEQ ID NO: 8146 - RNA, 42 nt, synthetic construct
  source 1..42: mol_type = other RNA
aaaaaaaaaaaaaaaataaataaataaataaatataaatata

SEQ ID NO: 8147 - RNA, 42 nt, synthetic construct
  source 1..42: mol_type = other RNA
aaataaaaaaaaaaaaaaaaaaaaaaaaaaaaaaaaaatata

SEQ ID NO: 8148 - RNA, 42 nt, synthetic construct
  source 1..42: mol_type = other RNA
aaaaaaaaaaaataaataaataaataaatataaataaatata

SEQ ID NO: 8149 - RNA, 42 nt, synthetic construct
  source 1..42: mol_type = other RNA
aaaaaaaaaaaataaataaataaataaataaatataaatata

SEQ ID NO: 8150 - RNA, 42 nt, synthetic construct
  source 1..42: mol_type = other RNA
aaaaaaaaaaaatataaataaataaataaataaataaatata

SEQ ID NO: 8151 - RNA, 42 nt, synthetic construct
  source 1..42: mol_type = other RNA
aaataaataaaaaaaaaaaaaaaaaaaaaaaaaaaaaatata

SEQ ID NO: 8152 - RNA, 42 nt, synthetic construct
  source 1..42: mol_type = other RNA
aaataaaaaaaaaaaaaaaaaaaaaaaaaaaaaataaatata

SEQ ID NO: 8153 - RNA, 42 nt, synthetic construct
  source 1..42: mol_type = other RNA
aaaaaaaataaataaataaataaataaataaatataaatata

SEQ ID NO: 8154 - RNA, 42 nt, synthetic construct
  source 1..42: mol_type = other RNA
aaaaaaaataaataaataaataaataaatataaataaatata

SEQ ID NO: 8155 - RNA, 42 nt, synthetic construct
  source 1..42: mol_type = other RNA
aaataaataaataaaaaaaaaaaaaaaaaaaaaaaaaatata

SEQ ID NO: 8156 - RNA, 42 nt, synthetic construct
  source 1..42: mol_type = other RNA
aaataaaaaaaaaaaaaaaaaaaaaaaaaataaataaatata

SEQ ID NO: 8157 - RNA, 42 nt, synthetic construct
  source 1..42: mol_type = other RNA
aaataaataaaaaaaaaaaaaaaaaaaaaaaaaataaatata

SEQ ID NO: 8158 - RNA, 42 nt, synthetic construct
  source 1..42: mol_type = other RNA
aaaataaataaataaataaataaataaatataaataaatata

SEQ ID NO: 8159 - RNA, 42 nt, synthetic construct
  source 1..42: mol_type = other RNA
aaaataaataaataaataaataaataaataaatataaatata

SEQ ID NO: 8160 - RNA, 42 nt, synthetic construct
  source 1..42: mol_type = other RNA
aaataaataaataaataaaaaaaaaaaaaaaaaaaaaatata

SEQ ID NO: 8161 - RNA, 42 nt, synthetic construct
  source 1..42: mol_type = other RNA
aaataaataaataaaaaaaaaaaaaaaaaaaaaataaatata

SEQ ID NO: 8162 - RNA, 42 nt, synthetic construct
  source 1..42: mol_type = other RNA
aaataaaaaaaaaaaaaaaaaaaaaataaataaataaatata

SEQ ID NO: 8163 - RNA, 42 nt, synthetic construct
  source 1..42: mol_type = other RNA
aaaaaaaaaaaaaaaaaaaaaaaaaaaaaaaaaaaatatata

SEQ ID NO: 8164 - RNA, 42 nt, synthetic construct
  source 1..42: mol_type = other RNA
aaataaataaataaataaataaaaaaaaaaaaaaaaaatata

SEQ ID NO: 8165 - RNA, 42 nt, synthetic construct
  source 1..42: mol_type = other RNA
aaataaataaataaataaaaaaaaaaaaaaaaaataaatata

SEQ ID NO: 8166 - RNA, 42 nt, synthetic construct
  source 1..42: mol_type = other RNA
aaataaataaataaaaaaaaaaaaaaaaaataaataaatata

SEQ ID NO: 8167 - RNA, 42 nt, synthetic construct
  source 1..42: mol_type = other RNA
aaataaaaaaaaaaaaaaaaaataaataaataaataaatata

SEQ ID NO: 8168 - RNA, 42 nt, synthetic construct
  source 1..42: mol_type = other RNA
aaataaataaaaaaaaaaaaaaaaaataaataaataaatata

SEQ ID NO: 8169 - RNA, 42 nt, synthetic construct
  source 1..42: mol_type = other RNA
aaaaaaaaaaaaaaaaaaaaaaaaaaaaaaaataaatatata

SEQ ID NO: 8170 - RNA, 42 nt, synthetic construct
  source 1..42: mol_type = other RNA
aaaaaaaaaaaaaaaaaaaaaaaaaaaaaaaaaaaaaaataa

SEQ ID NO: 8171 - RNA, 42 nt, synthetic construct
  source 1..42: mol_type = other RNA
aaataaataaataaataaataaataaaaaaaaaaaaaatata

SEQ ID NO: 8172 - RNA, 42 nt, synthetic construct
  source 1..42: mol_type = other RNA
aaataaataaataaataaataaaaaaaaaaaaaataaatata

SEQ ID NO: 8173 - RNA, 42 nt, synthetic construct
  source 1..42: mol_type = other RNA
aaataaataaataaataaaaaaaaaaaaaataaataaatata

SEQ ID NO: 8174 - RNA, 42 nt, synthetic construct
  source 1..42: mol_type = other RNA
aaataaataaaaaaaaaaaaaataaataaataaataaatata

SEQ ID NO: 8175 - RNA, 42 nt, synthetic construct
  source 1..42: mol_type = other RNA
aaataaataaataaaaaaaaaaaaaataaataaataaatata

SEQ ID NO: 8176 - RNA, 42 nt, synthetic construct
  source 1..42: mol_type = other RNA
aaaaaaaaaaaaaaaaaaaaaaaaaaaataaataaatatata

SEQ ID NO: 8177 - RNA, 42 nt, synthetic construct
  source 1..42: mol_type = other RNA
aaaaaaaaaaaaaaaaaaaaaaaaaaaaaaaaaaataaataa

SEQ ID NO: 8178 - RNA, 42 nt, synthetic construct
  source 1..42: mol_type = other RNA
aaataaataaataaataaataaataaaaaaaaaataaatata

SEQ ID NO: 8179 - RNA, 42 nt, synthetic construct
  source 1..42: mol_type = other RNA
aaataaataaataaataaataaataaataaaaaaaaaatata

SEQ ID NO: 8180 - RNA, 42 nt, synthetic construct
  source 1..42: mol_type = other RNA
aaataaataaataaataaaaaaaaaataaataaataaatata

SEQ ID NO: 8181 - RNA, 42 nt, synthetic construct
  source 1..42: mol_type = other RNA
aaaaaaaaaaaaaaaaaaaaaaaaaaaaaaataaataaataa

SEQ ID NO: 8182 - RNA, 42 nt, synthetic construct
  source 1..42: mol_type = other RNA
aaataaataaataaataaataaataaataaaaaataaatata

SEQ ID NO: 8183 - RNA, 42 nt, synthetic construct
  source 1..42: mol_type = other RNA
aaataaataaataaataaataaataaataaataaaaaatata

SEQ ID NO: 8184 - RNA, 42 nt, synthetic construct
  source 1..42: mol_type = other RNA
aaataaataaataaataaaaaataaataaataaataaatata

SEQ ID NO: 8185 - RNA, 42 nt, synthetic construct
  source 1..42: mol_type = other RNA
aaataaataaataaataaataaaaaataaataaataaatata

SEQ ID NO: 8186 - RNA, 42 nt, synthetic construct
  source 1..42: mol_type = other RNA
aaaaaaaaaaaaaaaaaaaataaataaataaataaatatata

SEQ ID NO: 8187 - RNA, 42 nt, synthetic construct
  source 1..42: mol_type = other RNA
aaaaaaaaaaaaaaaaaaaaaaaaaaaaaaaaaaaaaataaa

SEQ ID NO: 8188 - RNA, 42 nt, synthetic construct
  source 1..42: mol_type = other RNA
aaaaaaaaaaaaaaaaaaaaaaaaaaataaataaataaataa

SEQ ID NO: 8189 - RNA, 42 nt, synthetic construct
  source 1..42: mol_type = other RNA
aaaaaaaaaaaaaaaaaaaaaaaaaaaaaaaaaataaataaa

SEQ ID NO: 8190 - RNA, 42 nt, synthetic construct
  source 1..42: mol_type = other RNA
aaaaaaaaaaaaaaaaaaaaaaataaataaataaataaataa

SEQ ID NO: 8191 - RNA, 42 nt, synthetic construct
  source 1..42: mol_type = other RNA
aaaaaaaaaaaaaaaaaaaaaaaaaaaaaataaataaataaa

SEQ ID NO: 8192 - RNA, 42 nt, synthetic construct
  source 1..42: mol_type = other RNA
aaaaaaaaaaaaaaaaaaataaataaataaataaataaataa

SEQ ID NO: 8193 - RNA, 42 nt, synthetic construct
  source 1..42: mol_type = other RNA
aaaaaaaaaaaaaaaaaaaaaaaaaataaataaataaataaa

SEQ ID NO: 8194 - RNA, 42 nt, synthetic construct
  source 1..42: mol_type = other RNA
aaaaaaaaaaaaaaataaataaataaataaataaataaataa

SEQ ID NO: 8195 - RNA, 42 nt, synthetic construct
  source 1..42: mol_type = other RNA
aaaaaaaaaaaaaaaaaaaaaataaataaataaataaataaa

SEQ ID NO: 8196 - RNA, 42 nt, synthetic construct
  source 1..42: mol_type = other RNA
aaaaaaaaaaataaataaataaataaataaataaataaataa

SEQ ID NO: 8197 - RNA, 42 nt, synthetic construct
  source 1..42: mol_type = other RNA
aaaaaaataaataaataaataaataaataaataaataaataa

SEQ ID NO: 8198 - RNA, 42 nt, synthetic construct
  source 1..42: mol_type = other RNA
aaaaaaaaaaaaaataaataaataaataaataaataaataaa

SEQ ID NO: 8199 - RNA, 42 nt, synthetic construct
  source 1..42: mol_type = other RNA
aaaaaaaaaaaaaaaaaaaaaaaaaaaaaaaaaaaaaaatat

SEQ ID NO: 8200 - RNA, 42 nt, synthetic construct
  source 1..42: mol_type = other RNA
aaaaaaaaaataaataaataaataaataaataaataaataaa

SEQ ID NO: 8201 - RNA, 42 nt, synthetic construct
  source 1..42: mol_type = other RNA
aaaaaaaaaaaaaaaaaaaaaaaaaaaaaaaaaaataaatat

SEQ ID NO: 8202 - RNA, 42 nt, synthetic construct
  source 1..42: mol_type = other RNA
aaaaaaaaaaaaaaaaaaaaaaaaaaaaaaataaataaatat

SEQ ID NO: 8203 - RNA, 42 nt, synthetic construct
  source 1..42: mol_type = other RNA
aaaaaaaaaaaaaaaaaaaaaaaaaaataaataaataaatat

SEQ ID NO: 8204 - RNA, 42 nt, synthetic construct
  source 1..42: mol_type = other RNA
aaaaaaaaaaaaaaaaaaaaaaataaataaataaataaatat

SEQ ID NO: 8205 - RNA, 42 nt, synthetic construct
  source 1..42: mol_type = other RNA
aaaaaaaaaaaaaaaaaaataaataaataaataaataaatat

SEQ ID NO: 8206 - RNA, 42 nt, synthetic construct
  source 1..42: mol_type = other RNA
aaaaaaaaaaaaaaataaataaataaataaataaataaatat

SEQ ID NO: 8207 - RNA, 42 nt, synthetic construct
  source 1..42: mol_type = other RNA
aaaaaaaaaaataaataaataaataaataaataaataaatat

SEQ ID NO: 8208 - RNA, 42 nt, synthetic construct
  source 1..42: mol_type = other RNA
aaaaaaataaataaataaataaataaataaataaataaatat

SEQ ID NO: 8209 - RNA, 42 nt, synthetic construct
  source 1..42: mol_type = other RNA
aaataaataaataaataaataaataaatataaatataaataa

SEQ ID NO: 8210 - RNA, 42 nt, synthetic construct
  source 1..42: mol_type = other RNA
aaatataaataaatataaataaataaataaataaataaataa

SEQ ID NO: 8211 - RNA, 42 nt, synthetic construct
  source 1..42: mol_type = other RNA
aaatataaatataaataaataaataaataaataaataaataa

SEQ ID NO: 8212 - RNA, 42 nt, synthetic construct
  source 1..42: mol_type = other RNA
aaataaataaataaataaataaatataaataaataaatataa

SEQ ID NO: 8213 - RNA, 42 nt, synthetic construct
  source 1..42: mol_type = other RNA
aaataaataaataaataaatataaataaataaataaatataa

SEQ ID NO: 8214 - RNA, 42 nt, synthetic construct
  source 1..42: mol_type = other RNA
aaataaatataaatataaataaataaataaataaataaataa

SEQ ID NO: 8215 - RNA, 42 nt, synthetic construct
  source 1..42: mol_type = other RNA
aaaaaaaaaaaaaaaaaaaaaaaaaaaaaaaaaaaaaaaata

SEQ ID NO: 8216 - RNA, 42 nt, synthetic construct
  source 1..42: mol_type = other RNA
aaataaataaataaataaataaataaataaataataaatata

SEQ ID NO: 8217 - RNA, 42 nt, synthetic construct
  source 1..42: mol_type = other RNA
aaataaataaataaataaataaataataaataaataaatata

SEQ ID NO: 8218 - RNA, 42 nt, synthetic construct
  source 1..42: mol_type = other RNA
aaaaaaaaaaaaaaaaaaaaaaaaaaaaaaaaaaaataaata

SEQ ID NO: 8219 - RNA, 42 nt, synthetic construct
  source 1..42: mol_type = other RNA
aaaaaaaaaaaaaaaaaaaaaaaaaatataaatataaatata

SEQ ID NO: 8220 - RNA, 42 nt, synthetic construct
  source 1..42: mol_type = other RNA
aaaaaaaaaaaaaaaaaaaaaaaaaaaaaaaataaataaata

SEQ ID NO: 8221 - RNA, 42 nt, synthetic construct
  source 1..42: mol_type = other RNA
aaaaaaaaaaaaaaaaaaaaaatataaataaatataaatata

SEQ ID NO: 8222 - RNA, 42 nt, synthetic construct
  source 1..42: mol_type = other RNA
aaaaaaaaaaaaaaaaaaaaaataaatataaatataaatata

SEQ ID NO: 8223 - RNA, 42 nt, synthetic construct
  source 1..42: mol_type = other RNA
aaaaaaaaaaaaaaaaaataaatataaataaatataaatata

SEQ ID NO: 8224 - RNA, 42 nt, synthetic construct
  source 1..42: mol_type = other RNA
aaaaaaaaaaaaaaaaaatataaataaataaatataaatata

SEQ ID NO: 8225 - RNA, 42 nt, synthetic construct
  source 1..42: mol_type = other RNA
aaataaataaataaataaataaataaataaatatataaataa

SEQ ID NO: 8226 - RNA, 42 nt, synthetic construct
  source 1..42: mol_type = other RNA
aaataaatatataaataaataaataaataaataaataaataa

SEQ ID NO: 8227 - RNA, 42 nt, synthetic construct
  source 1..42: mol_type = other RNA
aaataaataaataaatatataaataaataaataaataaataa

SEQ ID NO: 8228 - RNA, 42 nt, synthetic construct
  source 1..42: mol_type = other RNA
aaatatataaataaataaataaataaataaataaataaataa

SEQ ID NO: 8229 - RNA, 42 nt, synthetic construct
  source 1..42: mol_type = other RNA
aaataaataaataaataaataaataaataaataaatatataa

SEQ ID NO: 8230 - RNA, 42 nt, synthetic construct
  source 1..42: mol_type = other RNA
aaaaaaaaaaaaaatataaataaataaataaatataaatata

SEQ ID NO: 8231 - RNA, 42 nt, synthetic construct
  source 1..42: mol_type = other RNA
aaaaaaaaaaaaaataaataaatataaataaatataaatata

SEQ ID NO: 8232 - RNA, 42 nt, synthetic construct
  source 1..42: mol_type = other RNA
aaaaaaaaaaaaaataaatataaataaataaatataaatata

SEQ ID NO: 8233 - RNA, 43 nt, synthetic construct
  source 1..43: mol_type = other RNA
aaataaataaataaataaataaataaataaataaataaatata

SEQ ID NO: 8234 - RNA, 43 nt, synthetic construct
  source 1..43: mol_type = other RNA
aaaaaaaaaaaaaaaaaaaaaaaaaaaaaaaaaaaaaaatata

SEQ ID NO: 8235 - RNA, 43 nt, synthetic construct
  source 1..43: mol_type = other RNA
aaaaaaaaaaaaaaaaaaaaaaaaaaaaaaaaaaataaatata

SEQ ID NO: 8236 - RNA, 43 nt, synthetic construct
  source 1..43: mol_type = other RNA
aaaaaaaaaaaaaaaaaaaaaaaaaaaaaaataaataaatata

SEQ ID NO: 8237 - RNA, 43 nt, synthetic construct
  source 1..43: mol_type = other RNA
aaaaaaaaaaaaaaaaaaaaaaaaaaataaataaataaatata

SEQ ID NO: 8238 - RNA, 43 nt, synthetic construct
  source 1..43: mol_type = other RNA
aaaaaaaaaaaaaaaaaaaaaaataaataaataaataaatata

SEQ ID NO: 8239 - RNA, 43 nt, synthetic construct
  source 1..43: mol_type = other RNA
aaaaaaaaaaaaaaaaaaataaataaataaataaataaatata

SEQ ID NO: 8240 - RNA, 43 nt, synthetic construct
  source 1..43: mol_type = other RNA
aaaaaaaaaaaaaaataaataaataaataaataaataaatata

SEQ ID NO: 8241 - RNA, 43 nt, synthetic construct
  source 1..43: mol_type = other RNA
aaaaaaaaaaataaataaataaataaataaataaataaatata

SEQ ID NO: 8242 - RNA, 43 nt, synthetic construct
  source 1..43: mol_type = other RNA
aaaaaaataaataaataaataaataaataaataaataaatata

SEQ ID NO: 8243 - RNA, 43 nt, synthetic construct
  source 1..43: mol_type = other RNA
aaatataaatataaataaataaataaataaataaataaatata

SEQ ID NO: 8244 - RNA, 43 nt, synthetic construct
  source 1..43: mol_type = other RNA
aaatataaataaataaataaataaatataaataaataaatata

SEQ ID NO: 8245 - RNA, 43 nt, synthetic construct
  source 1..43: mol_type = other RNA
aaataaataaataaataaataaataaatataaataaatatata

SEQ ID NO: 8246 - RNA, 43 nt, synthetic construct
  source 1..43: mol_type = other RNA
aaataaataaataaataaataaataaataaatataaatatata

SEQ ID NO: 8247 - RNA, 43 nt, synthetic construct
  source 1..43: mol_type = other RNA
aaatatataaataaataaataaataaataaataaataaatata

SEQ ID NO: 8248 - RNA, 43 nt, synthetic construct
  source 1..43: mol_type = other RNA
aaataaatatataaataaataaataaataaataaataaatata

SEQ ID NO: 8249 - RNA, 43 nt, synthetic construct
  source 1..43: mol_type = other RNA
aaataaataaataaataaataaataaataaatatataaatata

SEQ ID NO: 8250 - RNA, 43 nt, synthetic construct
  source 1..43: mol_type = other RNA
aaaaaaaaaaaaaaaaaaaaaaaaaaaaaaaaatataaatata

SEQ ID NO: 8251 - RNA, 43 nt, synthetic construct
  source 1..43: mol_type = other RNA
aaaaaaaaaaaaaaaaaaaaaaaaaaaaatataaataaatata

SEQ ID NO: 8252 - RNA, 43 nt, synthetic construct
  source 1..43: mol_type = other RNA
aaaaaaaaaaaaaaaaaaaaaaaaaaaaataaatataaatata

SEQ ID NO: 8253 - RNA, 43 nt, synthetic construct
  source 1..43: mol_type = other RNA
aaaaaaaaaaaaaaaaaaaaaaaaataaataaatataaatata

SEQ ID NO: 8254 - RNA, 43 nt, synthetic construct
  source 1..43: mol_type = other RNA
aaaaaaaaaaaaaaaaaaaaataaatataaataaataaatata

SEQ ID NO: 8255 - RNA, 43 nt, synthetic construct
  source 1..43: mol_type = other RNA
aaaaaaaaaaaaaaaaaaaaataaataaatataaataaatata

SEQ ID NO: 8256 - RNA, 43 nt, synthetic construct
  source 1..43: mol_type = other RNA
aaaaaaaaaaaaaaaaaaaaataaataaataaatataaatata

SEQ ID NO: 8257 - RNA, 43 nt, synthetic construct
  source 1..43: mol_type = other RNA
aaaaaaaaaaaaaaaaaaaaatataaataaataaataaatata

SEQ ID NO: 8258 - RNA, 43 nt, synthetic construct
  source 1..43: mol_type = other RNA
aaaaaaaaaaaaaaaaataaataaatataaataaataaatata

SEQ ID NO: 8259 - RNA, 43 nt, synthetic construct
  source 1..43: mol_type = other RNA
aaaaaaaaaaaaaaaaataaataaataaatataaataaatata

SEQ ID NO: 8260 - RNA, 43 nt, synthetic construct
  source 1..43: mol_type = other RNA
aaaaaaaaaaaaaaaaataaataaataaataaatataaatata

SEQ ID NO: 8261 - RNA, 43 nt, synthetic construct
  source 1..43: mol_type = other RNA
aaaaaaaaaaaaaaaaataaatataaataaataaataaatata

SEQ ID NO: 8262 - RNA, 43 nt, synthetic construct
  source 1..43: mol_type = other RNA
aaaaaaaaaaaaaaaaatataaataaataaataaataaatata

SEQ ID NO: 8263 - RNA, 43 nt, synthetic construct
  source 1..43: mol_type = other RNA
aaataaaaaaaaaaaaaaaaaaaaaaaaaaaaaaaaaaatata

SEQ ID NO: 8264 - RNA, 43 nt, synthetic construct
  source 1..43: mol_type = other RNA
aaaaaaaaaaaaataaataaataaataaataaatataaatata

SEQ ID NO: 8265 - RNA, 43 nt, synthetic construct
  source 1..43: mol_type = other RNA
aaaaaaaaaaaaataaataaataaatataaataaataaatata

SEQ ID NO: 8266 - RNA, 43 nt, synthetic construct
  source 1..43: mol_type = other RNA
aaaaaaaaaaaaataaataaataaataaatataaataaatata

SEQ ID NO: 8267 - RNA, 43 nt, synthetic construct
  source 1..43: mol_type = other RNA
aaaaaaaaaaaaatataaataaataaataaataaataaatata

SEQ ID NO: 8268 - RNA, 43 nt, synthetic construct
  source 1..43: mol_type = other RNA
aaaaaaaaaaaaataaataaatataaataaataaataaatata

SEQ ID NO: 8269 - RNA, 43 nt, synthetic construct
  source 1..43: mol_type = other RNA
aaaaaaaaaaaaataaatataaataaataaataaataaatata

SEQ ID NO: 8270 - RNA, 43 nt, synthetic construct
  source 1..43: mol_type = other RNA
aaataaataaaaaaaaaaaaaaaaaaaaaaaaaaaaaaatata

SEQ ID NO: 8271 - RNA, 43 nt, synthetic construct
  source 1..43: mol_type = other RNA
aaataaaaaaaaaaaaaaaaaaaaaaaaaaaaaaataaatata

SEQ ID NO: 8272 - RNA, 43 nt, synthetic construct
  source 1..43: mol_type = other RNA
aaaaaaaaatataaataaataaataaataaataaataaatata

SEQ ID NO: 8273 - RNA, 43 nt, synthetic construct
  source 1..43: mol_type = other RNA
aaaaaaaaataaataaataaataaataaatataaataaatata

SEQ ID NO: 8274 - RNA, 43 nt, synthetic construct
  source 1..43: mol_type = other RNA
aaaaaaaaataaataaataaataaatataaataaataaatata

SEQ ID NO: 8275 - RNA, 43 nt, synthetic construct
  source 1..43: mol_type = other RNA
aaaaaaaaataaataaataaataaataaataaatataaatata

SEQ ID NO: 8276 - RNA, 43 nt, synthetic construct
  source 1..43: mol_type = other RNA
aaaaaaaaataaataaatataaataaataaataaataaatata

SEQ ID NO: 8277 - RNA, 43 nt, synthetic construct
  source 1..43: mol_type = other RNA
aaaaaaaaataaataaataaatataaataaataaataaatata

SEQ ID NO: 8278 - RNA, 43 nt, synthetic construct
  source 1..43: mol_type = other RNA
aaataaataaataaaaaaaaaaaaaaaaaaaaaaaaaaatata

SEQ ID NO: 8279 - RNA, 43 nt, synthetic construct
  source 1..43: mol_type = other RNA
aaataaaaaaaaaaaaaaaaaaaaaaaaaaataaataaatata

SEQ ID NO: 8280 - RNA, 43 nt, synthetic construct
  source 1..43: mol_type = other RNA
aaataaataaaaaaaaaaaaaaaaaaaaaaaaaaataaatata

SEQ ID NO: 8281 - RNA, 43 nt, synthetic construct
  source 1..43: mol_type = other RNA
aaaaatataaataaataaataaataaataaataaataaatata

SEQ ID NO: 8282 - RNA, 43 nt, synthetic construct
  source 1..43: mol_type = other RNA
aaaaataaataaataaataaataaataaatataaataaatata

SEQ ID NO: 8283 - RNA, 43 nt, synthetic construct
  source 1..43: mol_type = other RNA
aaaaataaataaataaataaataaataaataaatataaatata

SEQ ID NO: 8284 - RNA, 43 nt, synthetic construct
  source 1..43: mol_type = other RNA
aaaaataaataaataaataaataaatataaataaataaatata

SEQ ID NO: 8285 - RNA, 43 nt, synthetic construct
  source 1..43: mol_type = other RNA
aaaaataaatataaataaataaataaataaataaataaatata

SEQ ID NO: 8286 - RNA, 43 nt, synthetic construct
  source 1..43: mol_type = other RNA
aaaaataaataaataaatataaataaataaataaataaatata

SEQ ID NO: 8287 - RNA, 43 nt, synthetic construct
  source 1..43: mol_type = other RNA
aaataaataaataaataaaaaaaaaaaaaaaaaaaaaaatata

SEQ ID NO: 8288 - RNA, 43 nt, synthetic construct
  source 1..43: mol_type = other RNA
aaataaaaaaaaaaaaaaaaaaaaaaataaataaataaatata

SEQ ID NO: 8289 - RNA, 43 nt, synthetic construct
  source 1..43: mol_type = other RNA
aaataaataaaaaaaaaaaaaaaaaaaaaaataaataaatata

SEQ ID NO: 8290 - RNA, 43 nt, synthetic construct
  source 1..43: mol_type = other RNA
aaaaaaaaaaaaaaaaaaaaaaaaaaaaaaaaaaaaatatata

SEQ ID NO: 8291 - RNA, 43 nt, synthetic construct
  source 1..43: mol_type = other RNA
aaataaataaataaataaataaaaaaaaaaaaaaaaaaatata

SEQ ID NO: 8292 - RNA, 43 nt, synthetic construct
  source 1..43: mol_type = other RNA
aaataaaaaaaaaaaaaaaaaaataaataaataaataaatata

SEQ ID NO: 8293 - RNA, 43 nt, synthetic construct
  source 1..43: mol_type = other RNA
aaaaaaaaaaaaaaaaaaaaaaaaaaaaaaaaataaatatata

SEQ ID NO: 8294 - RNA, 43 nt, synthetic construct
  source 1..43: mol_type = other RNA
aaaaaaaaaaaaaaaaaaaaaaaaaaaaaaaaaaaaaaaataa

SEQ ID NO: 8295 - RNA, 43 nt, synthetic construct
  source 1..43: mol_type = other RNA
aaataaataaataaataaataaataaaaaaaaaaaaaaatata

SEQ ID NO: 8296 - RNA, 43 nt, synthetic construct
  source 1..43: mol_type = other RNA
aaataaaaaaaaaaaaaaataaataaataaataaataaatata

SEQ ID NO: 8297 - RNA, 43 nt, synthetic construct
  source 1..43: mol_type = other RNA
aaataaataaaaaaaaaaaaaaataaataaataaataaatata

SEQ ID NO: 8298 - RNA, 43 nt, synthetic construct
  source 1..43: mol_type = other RNA
aaataaataaataaataaataaaaaaaaaaaaaaataaatata

SEQ ID NO: 8299 - RNA, 43 nt, synthetic construct
  source 1..43: mol_type = other RNA
aaaaaaaaaaaaaaaaaaaaaaaaaaaaataaataaatatata

SEQ ID NO: 8300 - RNA, 43 nt, synthetic construct
  source 1..43: mol_type = other RNA
aaaaaaaaaaaaaaaaaaaaaaaaaaaaaaaaaaaataaataa

SEQ ID NO: 8301 - RNA, 43 nt, synthetic construct
  source 1..43: mol_type = other RNA
aaataaataaataaataaataaataaataaaaaaaaaaatata

SEQ ID NO: 8302 - RNA, 43 nt, synthetic construct
  source 1..43: mol_type = other RNA
aaataaaaaaaaaaataaataaataaataaataaataaatata

SEQ ID NO: 8303 - RNA, 43 nt, synthetic construct
  source 1..43: mol_type = other RNA
aaataaataaataaataaataaaaaaaaaaataaataaatata

SEQ ID NO: 8304 - RNA, 43 nt, synthetic construct
  source 1..43: mol_type = other RNA
aaataaataaataaataaataaataaaaaaaaaaataaatata

SEQ ID NO: 8305 - RNA, 43 nt, synthetic construct
  source 1..43: mol_type = other RNA
aaataaataaaaaaaaaaataaataaataaataaataaatata

SEQ ID NO: 8306 - RNA, 43 nt, synthetic construct
  source 1..43: mol_type = other RNA
aaataaataaataaaaaaaaaaataaataaataaataaatata

SEQ ID NO: 8307 - RNA, 43 nt, synthetic construct
  source 1..43: mol_type = other RNA
aaaaaaaaaaaaaaaaaaaaaaaaataaataaataaatatata

SEQ ID NO: 8308 - RNA, 43 nt, synthetic construct
  source 1..43: mol_type = other RNA
aaaaaaaaaaaaaaaaaaaaaaaaaaaaaaaataaataaataa

SEQ ID NO: 8309 - RNA, 43 nt, synthetic construct
  source 1..43: mol_type = other RNA
aaataaaaaaataaataaataaataaataaataaataaatata

SEQ ID NO: 8310 - RNA, 43 nt, synthetic construct
  source 1..43: mol_type = other RNA
aaataaataaataaataaataaataaataaataaaaaaatata

SEQ ID NO: 8311 - RNA, 43 nt, synthetic construct
  source 1..43: mol_type = other RNA
aaataaataaataaataaataaataaaaaaataaataaatata

SEQ ID NO: 8312 - RNA, 43 nt, synthetic construct
  source 1..43: mol_type = other RNA
aaataaataaataaaaaaataaataaataaataaataaatata

SEQ ID NO: 8313 - RNA, 43 nt, synthetic construct
  source 1..43: mol_type = other RNA
aaataaataaataaataaataaataaataaaaaaataaatata

SEQ ID NO: 8314 - RNA, 43 nt, synthetic construct
  source 1..43: mol_type = other RNA
aaataaataaaaaaataaataaataaataaataaataaatata

SEQ ID NO: 8315 - RNA, 43 nt, synthetic construct
  source 1..43: mol_type = other RNA
aaataaataaataaataaaaaaataaataaataaataaatata

SEQ ID NO: 8316 - RNA, 43 nt, synthetic construct
  source 1..43: mol_type = other RNA
aaataaataaataaataaataaaaaaataaataaataaatata

SEQ ID NO: 8317 - RNA, 43 nt, synthetic construct
  source 1..43: mol_type = other RNA
aaaaaaaaaaaaaaaaaaaaaaaaaaaaaaaaaaaaaaataaa

SEQ ID NO: 8318 - RNA, 43 nt, synthetic construct
  source 1..43: mol_type = other RNA
aaaaaaaaaaaaaaaaaaaaaaaaaaaataaataaataaataa

SEQ ID NO: 8319 - RNA, 43 nt, synthetic construct
  source 1..43: mol_type = other RNA
aaaaaaaaaaaaaaaaaaaaaaaaaaaaaaaaaaataaataaa

SEQ ID NO: 8320 - RNA, 43 nt, synthetic construct
  source 1..43: mol_type = other RNA
aaaaaaaaaaaaaaaaaaaaaaaataaataaataaataaataa

SEQ ID NO: 8321 - RNA, 43 nt, synthetic construct
  source 1..43: mol_type = other RNA
aaaaaaaaaaaaaaaaaaaaaaaaaaaaaaataaataaataaa

SEQ ID NO: 8322 - RNA, 43 nt, synthetic construct
  source 1..43: mol_type = other RNA
aaaaaaaaaaaaaaaaaaaataaataaataaataaataaataa

SEQ ID NO: 8323 - RNA, 43 nt, synthetic construct
  source 1..43: mol_type = other RNA
aaaaaaaaaaaaaaaaaaaaaaaaaaataaataaataaataaa

SEQ ID NO: 8324 - RNA, 43 nt, synthetic construct
  source 1..43: mol_type = other RNA
aaaaaaaaaaaaaaaataaataaataaataaataaataaataa

SEQ ID NO: 8325 - RNA, 43 nt, synthetic construct
  source 1..43: mol_type = other RNA
aaaaaaaaaaaaaaaaaaaaaaataaataaataaataaataaa

SEQ ID NO: 8326 - RNA, 43 nt, synthetic construct
  source 1..43: mol_type = other RNA
aaaaaaaaaaaaaaaaaaataaataaataaataaataaataaa

SEQ ID NO: 8327 - RNA, 43 nt, synthetic construct
  source 1..43: mol_type = other RNA
aaaaaaaaaaaaaaataaataaataaataaataaataaataaa

SEQ ID NO: 8328 - RNA, 43 nt, synthetic construct
  source 1..43: mol_type = other RNA
aaaaaaaaaaaaaaaaaaaaaaaaaaaaaaaaaaaaaaaatat

SEQ ID NO: 8329 - RNA, 43 nt, synthetic construct
  source 1..43: mol_type = other RNA
aaaaaaaaaaataaataaataaataaataaataaataaataaa

SEQ ID NO: 8330 - RNA, 43 nt, synthetic construct
  source 1..43: mol_type = other RNA
aaaaaaaaaaaaaaaaaaaaaaaaaaaaaaaaaaaataaatat

SEQ ID NO: 8331 - RNA, 43 nt, synthetic construct
  source 1..43: mol_type = other RNA
aaaaaaaaaaaaaaaaaaaaaaaaaaaaaaaataaataaatat

SEQ ID NO: 8332 - RNA, 43 nt, synthetic construct
  source 1..43: mol_type = other RNA
aaaaaaaaaaaaaaaaaaaaaaaaaaaataaataaataaatat

SEQ ID NO: 8333 - RNA, 44 nt, synthetic construct
  source 1..44: mol_type = other RNA
aaaaaaaaaaaaaaaaaaaaaaaaaaaaaaaaaaaaaaaatata

SEQ ID NO: 8334 - RNA, 44 nt, synthetic construct
  source 1..44: mol_type = other RNA
aaaaaaaaaaaaaaaaaaaaaaaaaaaaaaaaaaaataaatata

SEQ ID NO: 8335 - RNA, 44 nt, synthetic construct
  source 1..44: mol_type = other RNA
aaaaaaaaaaaaaaaaaaaaaaaaaaaaaaaataaataaatata

SEQ ID NO: 8336 - RNA, 44 nt, synthetic construct
  source 1..44: mol_type = other RNA
aaaaaaaaaaaaaaaaaaaaaaaaaaaataaataaataaatata

SEQ ID NO: 8337 - RNA, 44 nt, synthetic construct
  source 1..44: mol_type = other RNA
aaaaaaaaaaaaaaaaaaaaaaaataaataaataaataaatata

SEQ ID NO: 8338 - RNA, 44 nt, synthetic construct
  source 1..44: mol_type = other RNA
aaataaataaataaataaataaataaatataaataaataaataa

SEQ ID NO: 8339 - RNA, 44 nt, synthetic construct
  source 1..44: mol_type = other RNA
aaaaaaaaaaaaaaaaaaaaaaaaaaaaaaaaaatataaatata

SEQ ID NO: 8340 - RNA, 44 nt, synthetic construct
  source 1..44: mol_type = other RNA
aaaaaaaaaaaaaaaaaaaaaaaaaaaaaataaatataaatata

SEQ ID NO: 8341 - RNA, 44 nt, synthetic construct
  source 1..44: mol_type = other RNA
aaaaaaaaaaaaaaaaaaaaaaaaaaaaaatataaataaatata

SEQ ID NO: 8342 - RNA, 44 nt, synthetic construct
  source 1..44: mol_type = other RNA
aaaaaaaaaaaaaaaaaaaaaaaaaataaataaatataaatata

SEQ ID NO: 8343 - RNA, 44 nt, synthetic construct
  source 1..44: mol_type = other RNA
aaaaaaaaaaaaaaaaaaaaaaaaaataaatataaataaatata

SEQ ID NO: 8344 - RNA, 44 nt, synthetic construct
  source 1..44: mol_type = other RNA
aaaaaaaaaaaaaaaaaaaaaaaaaatataaataaataaatata

SEQ ID NO: 8345 - RNA, 44 nt, synthetic construct
  source 1..44: mol_type = other RNA
aaaaaaaaaaaaaaaaaaaaaataaatataaataaataaatata

SEQ ID NO: 8346 - RNA, 44 nt, synthetic construct
  source 1..44: mol_type = other RNA
aaaaaaaaaaaaaaaaaaaaaatataaataaataaataaatata

SEQ ID NO: 8347 - RNA, 44 nt, synthetic construct
  source 1..44: mol_type = other RNA
aaaaaaaaaaaaaaaaaataaataaataaataaatataaatata

SEQ ID NO: 8348 - RNA, 44 nt, synthetic construct
  source 1..44: mol_type = other RNA
aaaaaaaaaaaaaaaaaataaatataaataaataaataaatata

SEQ ID NO: 8349 - RNA, 44 nt, synthetic construct
  source 1..44: mol_type = other RNA
aaataaaaaaaaaaaaaaaaaaaaaaaaaaaaaaaaaaaatata

SEQ ID NO: 8350 - RNA, 44 nt, synthetic construct
  source 1..44: mol_type = other RNA
aaaaaaaaaaaaaataaataaataaataaataaatataaatata

SEQ ID NO: 8351 - RNA, 44 nt, synthetic construct
  source 1..44: mol_type = other RNA
aaataaataaataaataaataaataaatataaataaataaatat

SEQ ID NO: 8352 - RNA, 44 nt, synthetic construct
  source 1..44: mol_type = other RNA
aaataaaaaaaaaaaaaaaaaaaaaaaaaaaaaaaataaatata

SEQ ID NO: 8353 - RNA, 44 nt, synthetic construct
  source 1..44: mol_type = other RNA
aaataaataaaaaaaaaaaaaaaaaaaaaaaaaaaaaaaatata

SEQ ID NO: 8354 - RNA, 44 nt, synthetic construct
  source 1..44: mol_type = other RNA
aaaaaaaaaataaataaataaataaataaataaatataaatata

SEQ ID NO: 8355 - RNA, 44 nt, synthetic construct
  source 1..44: mol_type = other RNA
aaataaataaataaaaaaaaaaaaaaaaaaaaaaaaaaaatata

SEQ ID NO: 8356 - RNA, 44 nt, synthetic construct
  source 1..44: mol_type = other RNA
aaataaaaaaaaaaaaaaaaaaaaaaaaaaaataaataaatata

SEQ ID NO: 8357 - RNA, 44 nt, synthetic construct
  source 1..44: mol_type = other RNA
aaataaataaaaaaaaaaaaaaaaaaaaaaaaaaaataaatata

SEQ ID NO: 8358 - RNA, 44 nt, synthetic construct
  source 1..44: mol_type = other RNA
aaaaaataaataaataaataaataaataaataaatataaatata

SEQ ID NO: 8359 - RNA, 44 nt, synthetic construct
  source 1..44: mol_type = other RNA
aaataaataaataaataaaaaaaaaaaaaaaaaaaaaaaatata

SEQ ID NO: 8360 - RNA, 44 nt, synthetic construct
  source 1..44: mol_type = other RNA
aaaaaaaaaaaaaaaaaaaaaaaaaaaaaaaaaaaaaatatata

SEQ ID NO: 8361 - RNA, 44 nt, synthetic construct
  source 1..44: mol_type = other RNA
aaataaaaaaaaaaaaaaaaaaaaaaaataaataaataaatata

SEQ ID NO: 8362 - RNA, 44 nt, synthetic construct
  source 1..44: mol_type = other RNA
aaataaataaataaaaaaaaaaaaaaaaaaaaaaaataaatata

SEQ ID NO: 8363 - RNA, 44 nt, synthetic construct
  source 1..44: mol_type = other RNA
aaataaataaaaaaaaaaaaaaaaaaaaaaaataaataaatata

SEQ ID NO: 8364 - RNA, 44 nt, synthetic construct
  source 1..44: mol_type = other RNA
aaataaataaataaataaaaaaaaaaaaaaaaaaaataaatata

SEQ ID NO: 8365 - RNA, 44 nt, synthetic construct
  source 1..44: mol_type = other RNA
aaataaataaataaataaataaaaaaaaaaaaaaaaaaaatata

SEQ ID NO: 8366 - RNA, 44 nt, synthetic construct
  source 1..44: mol_type = other RNA
aaataaataaataaaaaaaaaaaaaaaaaaaataaataaatata

SEQ ID NO: 8367 - RNA, 44 nt, synthetic construct
  source 1..44: mol_type = other RNA
aaataaataaaaaaaaaaaaaaaaaaaataaataaataaatata

SEQ ID NO: 8368 - RNA, 44 nt, synthetic construct
  source 1..44: mol_type = other RNA
aaaaaaaaaaaaaaaaaaaaaaaaaaaaaaaaaataaatatata

SEQ ID NO: 8369 - RNA, 44 nt, synthetic construct
  source 1..44: mol_type = other RNA
aaaaaaaaaaaaaaaaaaaaaaaaaaaaaaaaaaaaaaaaataa

SEQ ID NO: 8370 - RNA, 44 nt, synthetic construct
  source 1..44: mol_type = other RNA
aaataaataaataaataaataaataaaaaaaaaaaaaaaatata

SEQ ID NO: 8371 - RNA, 44 nt, synthetic construct
  source 1..44: mol_type = other RNA
aaataaataaataaataaataaaaaaaaaaaaaaaataaatata

SEQ ID NO: 8372 - RNA, 44 nt, synthetic construct
  source 1..44: mol_type = other RNA
aaataaataaataaataaaaaaaaaaaaaaaataaataaatata

SEQ ID NO: 8373 - RNA, 44 nt, synthetic construct
  source 1..44: mol_type = other RNA
aaataaataaataaaaaaaaaaaaaaaataaataaataaatata

SEQ ID NO: 8374 - RNA, 44 nt, synthetic construct
  source 1..44: mol_type = other RNA
aaaaaaaaaaaaaaaaaaaaaaaaaaaaaaaaaaaaataaataa

SEQ ID NO: 8375 - RNA, 44 nt, synthetic construct
  source 1..44: mol_type = other RNA
aaataaataaataaataaataaataaaaaaaaaaaataaatata

SEQ ID NO: 8376 - RNA, 44 nt, synthetic construct
  source 1..44: mol_type = other RNA
aaataaataaataaataaataaaaaaaaaaaataaataaatata

SEQ ID NO: 8377 - RNA, 44 nt, synthetic construct
  source 1..44: mol_type = other RNA
aaataaataaataaataaataaataaataaaaaaaaaaaatata

SEQ ID NO: 8378 - RNA, 44 nt, synthetic construct
  source 1..44: mol_type = other RNA
aaataaataaataaataaaaaaaaaaaataaataaataaatata

SEQ ID NO: 8379 - RNA, 44 nt, synthetic construct
  source 1..44: mol_type = other RNA
aaaaaaaaaaaaaaaaaaaaaaaaaataaataaataaatatata

SEQ ID NO: 8380 - RNA, 44 nt, synthetic construct
  source 1..44: mol_type = other RNA
aaaaaaaaaaaaaaaaaaaaaaaaaaaaaaaaataaataaataa

SEQ ID NO: 8381 - RNA, 44 nt, synthetic construct
  source 1..44: mol_type = other RNA
aaataaataaataaataaataaataaaaaaaataaataaatata

SEQ ID NO: 8382 - RNA, 44 nt, synthetic construct
  source 1..44: mol_type = other RNA
aaataaataaataaataaataaataaataaaaaaaataaatata

SEQ ID NO: 8383 - RNA, 44 nt, synthetic construct
  source 1..44: mol_type = other RNA
aaataaataaataaataaataaataaataaataaaaaaaatata

SEQ ID NO: 8384 - RNA, 44 nt, synthetic construct
  source 1..44: mol_type = other RNA
aaaaaaaaaaaaaaaaaaaaaaaaaaaaaaaaaaaaaaaataaa

SEQ ID NO: 8385 - RNA, 44 nt, synthetic construct
  source 1..44: mol_type = other RNA
aaaaaaaaaaaaaaaaaaaaaaaaaaaaataaataaataaataa

SEQ ID NO: 8386 - RNA, 44 nt, synthetic construct
  source 1..44: mol_type = other RNA
aaataaataaataaataaataaataaataaataaataaaatata

SEQ ID NO: 8387 - RNA, 44 nt, synthetic construct
  source 1..44: mol_type = other RNA
aaataaataaataaataaataaataaataaataaaataaatata

SEQ ID NO: 8388 - RNA, 44 nt, synthetic construct
  source 1..44: mol_type = other RNA
aaaaaaaaaaaaaaaaaaaaaaaaaaaaaaaaaaaataaataaa

SEQ ID NO: 8389 - RNA, 44 nt, synthetic construct
  source 1..44: mol_type = other RNA
aaaaaaaaaaaaaaaaaaaaaaaaataaataaataaataaataa

SEQ ID NO: 8390 - RNA, 44 nt, synthetic construct
  source 1..44: mol_type = other RNA
aaaaaaaaaaaaaaaaaaaaaaaaaaaaaaaataaataaataaa

SEQ ID NO: 8391 - RNA, 44 nt, synthetic construct
  source 1..44: mol_type = other RNA
aaaaaaaaaaaaaaaaaaaaataaataaataaataaataaataa

SEQ ID NO: 8392 - RNA, 44 nt, synthetic construct
  source 1..44: mol_type = other RNA
aaaaaaaaaaaaaaaaaaaaaaaaaaaaaaaaaaaaaaaaatat

SEQ ID NO: 8393 - RNA, 44 nt, synthetic construct
  source 1..44: mol_type = other RNA
aaaaaaaaaaaaaaaaaaaaaaaaaaaaaaaaaaaaataaatat

SEQ ID NO: 8394 - RNA, 44 nt, synthetic construct
  source 1..44: mol_type = other RNA
aaaaaaaaaaaaaaaaaaaaaaaaaaaaaaaaataaataaatat

SEQ ID NO: 8395 - RNA, 44 nt, synthetic construct
  source 1..44: mol_type = other RNA
aaaaaaaaaaaaaaaaaaaaaaaaaaaaataaataaataaatat

SEQ ID NO: 8396 - RNA, 44 nt, synthetic construct
  source 1..44: mol_type = other RNA
aaaaaaaaaaaaaaaaaaaaaaaaataaataaataaataaatat

SEQ ID NO: 8397 - RNA, 44 nt, synthetic construct
  source 1..44: mol_type = other RNA
aaaaaaaaaaaaaaaaaaaaataaataaataaataaataaatat

SEQ ID NO: 8398 - RNA, 44 nt, synthetic construct
  source 1..44: mol_type = other RNA
aaaaaaaaaaaaaaaaaaaaaaaaaaaaaaaaaaaaaaaaaata

SEQ ID NO: 8399 - RNA, 44 nt, synthetic construct
  source 1..44: mol_type = other RNA
aaaaaaaaaaaaaaaaaaaaaaaaaaaaaaaaaaaaaataaata

SEQ ID NO: 8400 - RNA, 44 nt, synthetic construct
  source 1..44: mol_type = other RNA
aaaaaaaaaaaaaaaaaaaaaaaaaaaaaaaaaataaataaata

SEQ ID NO: 8401 - RNA, 44 nt, synthetic construct
  source 1..44: mol_type = other RNA
aaaaaaaaaaaaaaaaaaaaaaaaaaaaaataaataaataaata

SEQ ID NO: 8402 - RNA, 44 nt, synthetic construct
  source 1..44: mol_type = other RNA
aaaaaaaaaaaaaaaaaaaatataaatataaataaataaatata

SEQ ID NO: 8403 - RNA, 44 nt, synthetic construct
  source 1..44: mol_type = other RNA
aaaaaaaaaaaaaaaaaaaaaaaaaataaataaataaataaata

SEQ ID NO: 8404 - RNA, 44 nt, synthetic construct
  source 1..44: mol_type = other RNA
aaaaaaaaaaaaaaaataaatataaatataaataaataaatata

SEQ ID NO: 8405 - RNA, 44 nt, synthetic construct
  source 1..44: mol_type = other RNA
aaaaaaaaaaaaaaaatataaatataaataaataaataaatata

SEQ ID NO: 8406 - RNA, 44 nt, synthetic construct
  source 1..44: mol_type = other RNA
aaatataaaaaaaaaaaaaaaaaaaaaaaaaaaaaaaaaatata

SEQ ID NO: 8407 - RNA, 44 nt, synthetic construct
  source 1..44: mol_type = other RNA
aaaaaaaaaaaatataaataaataaataaataaatataaatata

SEQ ID NO: 8408 - RNA, 44 nt, synthetic construct
  source 1..44: mol_type = other RNA
aaaaaaaaaaaataaatataaatataaataaataaataaatata

SEQ ID NO: 8409 - RNA, 44 nt, synthetic construct
  source 1..44: mol_type = other RNA
aaatataaaaaaaaaaaaaaaaaaaaaaaaaaaaaataaatata

SEQ ID NO: 8410 - RNA, 44 nt, synthetic construct
  source 1..44: mol_type = other RNA
aaataaaaaaaaaaaaaaaaaaaaaaaaaaaaaatataaatata

SEQ ID NO: 8411 - RNA, 44 nt, synthetic construct
  source 1..44: mol_type = other RNA
aaataaatataaaaaaaaaaaaaaaaaaaaaaaaaaaaaatata

SEQ ID NO: 8412 - RNA, 44 nt, synthetic construct
  source 1..44: mol_type = other RNA
aaaaaaaataaatataaataaataaataaataaatataaatata

SEQ ID NO: 8413 - RNA, 44 nt, synthetic construct
  source 1..44: mol_type = other RNA
aaataaataaatataaaaaaaaaaaaaaaaaaaaaaaaaatata

SEQ ID NO: 8414 - RNA, 44 nt, synthetic construct
  source 1..44: mol_type = other RNA
aaatataaaaaaaaaaaaaaaaaaaaaaaaaataaataaatata

SEQ ID NO: 8415 - RNA, 44 nt, synthetic construct
  source 1..44: mol_type = other RNA
aaataaaaaaaaaaaaaaaaaaaaaaaaaatataaataaatata

SEQ ID NO: 8416 - RNA, 44 nt, synthetic construct
  source 1..44: mol_type = other RNA
aaataaaaaaaaaaaaaaaaaaaaaaaaaataaatataaatata

SEQ ID NO: 8417 - RNA, 44 nt, synthetic construct
  source 1..44: mol_type = other RNA
aaataaatataaataaaaaaaaaaaaaaaaaaaaaaaaaatata

SEQ ID NO: 8418 - RNA, 44 nt, synthetic construct
  source 1..44: mol_type = other RNA
aaataaatataaaaaaaaaaaaaaaaaaaaaaaaaataaatata

SEQ ID NO: 8419 - RNA, 44 nt, synthetic construct
  source 1..44: mol_type = other RNA
aaataaataaaaaaaaaaaaaaaaaaaaaaaaaatataaatata

SEQ ID NO: 8420 - RNA, 44 nt, synthetic construct
  source 1..44: mol_type = other RNA
aaaatataaataaataaataaataaataaataaatataaatata

SEQ ID NO: 8421 - RNA, 44 nt, synthetic construct
  source 1..44: mol_type = other RNA
aaataaataaataaatataaaaaaaaaaaaaaaaaaaaaatata

SEQ ID NO: 8422 - RNA, 44 nt, synthetic construct
  source 1..44: mol_type = other RNA
aaataaataaatataaataaaaaaaaaaaaaaaaaaaaaatata

SEQ ID NO: 8423 - RNA, 44 nt, synthetic construct
  source 1..44: mol_type = other RNA
aaataaataaataaaaaaaaaaaaaaaaaaaaaatataaatata

SEQ ID NO: 8424 - RNA, 44 nt, synthetic construct
  source 1..44: mol_type = other RNA
aaataaaaaaaaaaaaaaaaaaaaaataaataaatataaatata

SEQ ID NO: 8425 - RNA, 44 nt, synthetic construct
  source 1..44: mol_type = other RNA
aaataaaaaaaaaaaaaaaaaaaaaatataaataaataaatata

SEQ ID NO: 8426 - RNA, 44 nt, synthetic construct
  source 1..44: mol_type = other RNA
aaatataaaaaaaaaaaaaaaaaaaaaataaataaataaatata

SEQ ID NO: 8427 - RNA, 44 nt, synthetic construct
  source 1..44: mol_type = other RNA
aaataaaaaaaaaaaaaaaaaaaaaataaatataaataaatata

SEQ ID NO: 8428 - RNA, 44 nt, synthetic construct
  source 1..44: mol_type = other RNA
aaataaatataaataaataaaaaaaaaaaaaaaaaaaaaatata

SEQ ID NO: 8429 - RNA, 44 nt, synthetic construct
  source 1..44: mol_type = other RNA
aaatataaataaataaataaaaaaaaaaaaaaaaaaaaaatata

SEQ ID NO: 8430 - RNA, 44 nt, synthetic construct
  source 1..44: mol_type = other RNA
aaatataaataaataaaaaaaaaaaaaaaaaaaaaataaatata

SEQ ID NO: 8431 - RNA, 44 nt, synthetic construct
  source 1..44: mol_type = other RNA
aaataaatataaaaaaaaaaaaaaaaaaaaaataaataaatata

SEQ ID NO: 8432 - RNA, 44 nt, synthetic construct
  source 1..44: mol_type = other RNA
aaataaatataaataaaaaaaaaaaaaaaaaaaaaataaatata

SEQ ID NO: 8433 - RNA, 45 nt, synthetic construct
  source 1..45: mol_type = other RNA
aaatataaataaataaataaataaataaataaataaataaatata

SEQ ID NO: 8434 - RNA, 45 nt, synthetic construct
  source 1..45: mol_type = other RNA
aaaaaaaaaaaaaaaaaaaaaaaaaaaaaaaaaaaaaaaaatata

SEQ ID NO: 8435 - RNA, 45 nt, synthetic construct
  source 1..45: mol_type = other RNA
aaaaaaaaaaaaaaaaaaaaaaaaaaaaaaaaaaaaataaatata

SEQ ID NO: 8436 - RNA, 45 nt, synthetic construct
  source 1..45: mol_type = other RNA
aaaaaaaaaaaaaaaaaaaaaaaaaaaaaaaaataaataaatata

SEQ ID NO: 8437 - RNA, 45 nt, synthetic construct
  source 1..45: mol_type = other RNA
aaaaaaaaaaaaaaaaaaaaaaaaaaaaataaataaataaatata

SEQ ID NO: 8438 - RNA, 45 nt, synthetic construct
  source 1..45: mol_type = other RNA
aaaaaaaaaaaaaaaaaaaaaaaaataaataaataaataaatata

SEQ ID NO: 8439 - RNA, 45 nt, synthetic construct
  source 1..45: mol_type = other RNA
aaaaaaaaaaaaaaaaaaaaataaataaataaataaataaatata

SEQ ID NO: 8440 - RNA, 45 nt, synthetic construct
  source 1..45: mol_type = other RNA
aaaaaaaaaaaaaaaaataaataaataaataaataaataaatata

SEQ ID NO: 8441 - RNA, 45 nt, synthetic construct
  source 1..45: mol_type = other RNA
aaaaaaaaaaaaataaataaataaataaataaataaataaatata

SEQ ID NO: 8442 - RNA, 45 nt, synthetic construct
  source 1..45: mol_type = other RNA
aaaaaaaaataaataaataaataaataaataaataaataaatata

SEQ ID NO: 8443 - RNA, 45 nt, synthetic construct
  source 1..45: mol_type = other RNA
aaaaataaataaataaataaataaataaataaataaataaatata

SEQ ID NO: 8444 - RNA, 45 nt, synthetic construct
  source 1..45: mol_type = other RNA
aaaaaaaaaaaaaaaaaaaaaaaaaaaaaaaaaaatataaatata

SEQ ID NO: 8445 - RNA, 45 nt, synthetic construct
  source 1..45: mol_type = other RNA
aaaaaaaaaaaaaaaaaaaaaaaaaaaaaaataaatataaatata

SEQ ID NO: 8446 - RNA, 45 nt, synthetic construct
  source 1..45: mol_type = other RNA
aaaaaaaaaaaaaaaaaaaaaaaaaaaaaaatataaataaatata

SEQ ID NO: 8447 - RNA, 45 nt, synthetic construct
  source 1..45: mol_type = other RNA
aaaaaaaaaaaaaaaaaaaaaaaaaaataaataaatataaatata

SEQ ID NO: 8448 - RNA, 45 nt, synthetic construct
  source 1..45: mol_type = other RNA
aaaaaaaaaaaaaaaaaaaaaaaaaaataaatataaataaatata

SEQ ID NO: 8449 - RNA, 45 nt, synthetic construct
  source 1..45: mol_type = other RNA
aaaaaaaaaaaaaaaaaaaaaaaaaaatataaataaataaatata

SEQ ID NO: 8450 - RNA, 45 nt, synthetic construct
  source 1..45: mol_type = other RNA
aaaaaaaaaaaaaaaaaaaaaaataaataaataaatataaatata

SEQ ID NO: 8451 - RNA, 45 nt, synthetic construct
  source 1..45: mol_type = other RNA
aaaaaaaaaaaaaaaaaaaaaaatataaataaataaataaatata

SEQ ID NO: 8452 - RNA, 45 nt, synthetic construct
  source 1..45: mol_type = other RNA
aaaaaaaaaaaaaaaaaaaaaaataaataaatataaataaatata

SEQ ID NO: 8453 - RNA, 45 nt, synthetic construct
  source 1..45: mol_type = other RNA
aaaaaaaaaaaaaaaaaaataaataaataaataaatataaatata

SEQ ID NO: 8454 - RNA, 45 nt, synthetic construct
  source 1..45: mol_type = other RNA
aaataaaaaaaaaaaaaaaaaaaaaaaaaaaaaaaaaaaaatata

SEQ ID NO: 8455 - RNA, 45 nt, synthetic construct
  source 1..45: mol_type = other RNA
aaaaaaaaaaaaaaataaataaataaataaataaatataaatata

SEQ ID NO: 8456 - RNA, 45 nt, synthetic construct
  source 1..45: mol_type = other RNA
aaataaaaaaaaaaaaaaaaaaaaaaaaaaaaaaaaataaatata

SEQ ID NO: 8457 - RNA, 45 nt, synthetic construct
  source 1..45: mol_type = other RNA
aaataaataaaaaaaaaaaaaaaaaaaaaaaaaaaaaaaaatata

SEQ ID NO: 8458 - RNA, 45 nt, synthetic construct
  source 1..45: mol_type = other RNA
aaataaaaaaaaaaaaaaaaaaaaaaaaaaaaataaataaatata

SEQ ID NO: 8459 - RNA, 45 nt, synthetic construct
  source 1..45: mol_type = other RNA
aaataaataaataaaaaaaaaaaaaaaaaaaaaaaaaaaaatata

SEQ ID NO: 8460 - RNA, 45 nt, synthetic construct
  source 1..45: mol_type = other RNA
aaataaaaaaaaaaaaaaaaaaaaaaaaataaataaataaatata

SEQ ID NO: 8461 - RNA, 45 nt, synthetic construct
  source 1..45: mol_type = other RNA
aaaaaaaaaaaaaaaaaaaaaaaaaaaaaaaaaaaaaaatatata

SEQ ID NO: 8462 - RNA, 45 nt, synthetic construct
  source 1..45: mol_type = other RNA
aaataaaaaaaaaaaaaaaaaaaaataaataaataaataaatata

SEQ ID NO: 8463 - RNA, 45 nt, synthetic construct
  source 1..45: mol_type = other RNA
aaataaataaaaaaaaaaaaaaaaaaaaataaataaataaatata

SEQ ID NO: 8464 - RNA, 45 nt, synthetic construct
  source 1..45: mol_type = other RNA
aaaaaaaaaaaaaaaaaaaaaaaaaaaaaaaaaaataaatatata

SEQ ID NO: 8465 - RNA, 45 nt, synthetic construct
  source 1..45: mol_type = other RNA
aaaaaaaaaaaaaaaaaaaaaaaaaaaaaaaaaaaaaaaaaataa

SEQ ID NO: 8466 - RNA, 45 nt, synthetic construct
  source 1..45: mol_type = other RNA
aaataaaaaaaaaaaaaaaaataaataaataaataaataaatata

SEQ ID NO: 8467 - RNA, 45 nt, synthetic construct
  source 1..45: mol_type = other RNA
aaataaataaaaaaaaaaaaaaaaataaataaataaataaatata

SEQ ID NO: 8468 - RNA, 45 nt, synthetic construct
  source 1..45: mol_type = other RNA
aaataaataaataaaaaaaaaaaaaaaaataaataaataaatata

SEQ ID NO: 8469 - RNA, 45 nt, synthetic construct
  source 1..45: mol_type = other RNA
aaaaaaaaaaaaaaaaaaaaaaaaaaaaaaataaataaatatata

SEQ ID NO: 8470 - RNA, 45 nt, synthetic construct
  source 1..45: mol_type = other RNA
aaaaaaaaaaaaaaaaaaaaaaaaaaaaaaaaaaaaaataaataa

SEQ ID NO: 8471 - RNA, 45 nt, synthetic construct
  source 1..45: mol_type = other RNA
aaaaaaaaaaaaaaaaaaaaaaaaaaataaataaataaatatata

SEQ ID NO: 8472 - RNA, 45 nt, synthetic construct
  source 1..45: mol_type = other RNA
aaataaaaaaaaaaaaataaataaataaataaataaataaatata

SEQ ID NO: 8473 - RNA, 45 nt, synthetic construct
  source 1..45: mol_type = other RNA
aaataaataaataaaaaaaaaaaaataaataaataaataaatata

SEQ ID NO: 8474 - RNA, 45 nt, synthetic construct
  source 1..45: mol_type = other RNA
aaataaataaaaaaaaaaaaataaataaataaataaataaatata

SEQ ID NO: 8475 - RNA, 45 nt, synthetic construct
  source 1..45: mol_type = other RNA
aaaaaaaaaaaaaaaaaaaaaaaaaaaaaaaaaataaataaataa

SEQ ID NO: 8476 - RNA, 45 nt, synthetic construct
  source 1..45: mol_type = other RNA
aaataaaaaaaaataaataaataaataaataaataaataaatata

SEQ ID NO: 8477 - RNA, 45 nt, synthetic construct
  source 1..45: mol_type = other RNA
aaataaataaataaaaaaaaataaataaataaataaataaatata

SEQ ID NO: 8478 - RNA, 45 nt, synthetic construct
  source 1..45: mol_type = other RNA
aaaaaaaaaaaaaaaaaaaaaaataaataaataaataaatatata

SEQ ID NO: 8479 - RNA, 45 nt, synthetic construct
  source 1..45: mol_type = other RNA
aaaaaaaaaaaaaaaaaaaaaaaaaaaaaaaaaaaaaaaaataaa

SEQ ID NO: 8480 - RNA, 45 nt, synthetic construct
  source 1..45: mol_type = other RNA
aaataaaaataaataaataaataaataaataaataaataaatata

SEQ ID NO: 8481 - RNA, 45 nt, synthetic construct
  source 1..45: mol_type = other RNA
aaaaaaaaaaaaaaaaaaataaataaataaataaataaatatata

SEQ ID NO: 8482 - RNA, 45 nt, synthetic construct
  source 1..45: mol_type = other RNA
aaaaaaaaaaaaaaaaaaaaaaaaaaaaaaaaaaaaataaataaa

SEQ ID NO: 8483 - RNA, 45 nt, synthetic construct
  source 1..45: mol_type = other RNA
aaaaaaaaaaaaaaaaaaaaaaaaaataaataaataaataaataa

SEQ ID NO: 8484 - RNA, 45 nt, synthetic construct
  source 1..45: mol_type = other RNA
aaaaaaaaaaaaaaataaataaataaataaataaataaatatata

SEQ ID NO: 8485 - RNA, 45 nt, synthetic construct
  source 1..45: mol_type = other RNA
aaaaaaaaaaaaaaaaaaaaaaaaaaaaaaaaataaataaataaa

SEQ ID NO: 8486 - RNA, 45 nt, synthetic construct
  source 1..45: mol_type = other RNA
aaaaaaaaaaaaaaaaaaaaaataaataaataaataaataaataa

SEQ ID NO: 8487 - RNA, 45 nt, synthetic construct
  source 1..45: mol_type = other RNA
aaaaaaaaaaaaaaaaaaaaaaaaaaaaataaataaataaataaa

SEQ ID NO: 8488 - RNA, 45 nt, synthetic construct
  source 1..45: mol_type = other RNA
aaaaaaaaaaaaaaaaaataaataaataaataaataaataaataa

SEQ ID NO: 8489 - RNA, 45 nt, synthetic construct
  source 1..45: mol_type = other RNA
aaaaaaaaaaaaaaaaaaaaaaaaataaataaataaataaataaa

SEQ ID NO: 8490 - RNA, 45 nt, synthetic construct
  source 1..45: mol_type = other RNA
aaaaaaaaaaaaaataaataaataaataaataaataaataaataa

SEQ ID NO: 8491 - RNA, 45 nt, synthetic construct
  source 1..45: mol_type = other RNA
aaaaaaaaaaaaaaaaaaaaataaataaataaataaataaataaa

SEQ ID NO: 8492 - RNA, 45 nt, synthetic construct
  source 1..45: mol_type = other RNA
aaaaaaaaaaaaaaaaaaaaaaaaaaaaaaaaaaaaaaaaaatat

SEQ ID NO: 8493 - RNA, 45 nt, synthetic construct
  source 1..45: mol_type = other RNA
aaatataaataaataaataaataaatataaataaatataaatata

SEQ ID NO: 8494 - RNA, 45 nt, synthetic construct
  source 1..45: mol_type = other RNA
aaatataaataaataaataaataaataaatataaatataaatata

SEQ ID NO: 8495 - RNA, 45 nt, synthetic construct
  source 1..45: mol_type = other RNA
aaatataaataaataaataaatataaataaataaatataaatata

SEQ ID NO: 8496 - RNA, 45 nt, synthetic construct
  source 1..45: mol_type = other RNA
aaatataaataaataaataaataaatataaatataaataaatata

SEQ ID NO: 8497 - RNA, 45 nt, synthetic construct
  source 1..45: mol_type = other RNA
aaatataaataaataaataaatataaatataaataaataaatata

SEQ ID NO: 8498 - RNA, 45 nt, synthetic construct
  source 1..45: mol_type = other RNA
aaatataaataaataaataaatataaataaatataaataaatata

SEQ ID NO: 8499 - RNA, 45 nt, synthetic construct
  source 1..45: mol_type = other RNA
aaataaatataaatataaataaataaataaatataaataaatata

SEQ ID NO: 8500 - RNA, 45 nt, synthetic construct
  source 1..45: mol_type = other RNA
aaataaatataaatataaataaataaatataaataaataaatata

SEQ ID NO: 8501 - RNA, 45 nt, synthetic construct
  source 1..45: mol_type = other RNA
aaataaatataaatataaataaataaataaataaatataaatata

SEQ ID NO: 8502 - RNA, 45 nt, synthetic construct
  source 1..45: mol_type = other RNA
aaaaaaaaaaaaaaaaaaaaaaaaaaaaaaaaaaaaaataaatat

SEQ ID NO: 8503 - RNA, 45 nt, synthetic construct
  source 1..45: mol_type = other RNA
aaaaaaaaaaaaaaaaaaaaaaaaaaaaaaaaaataaataaatat

SEQ ID NO: 8504 - RNA, 45 nt, synthetic construct
  source 1..45: mol_type = other RNA
aaaaaaaaaaaaaaaaaaaaaaaaaataaataaataaataaatat

SEQ ID NO: 8505 - RNA, 45 nt, synthetic construct
  source 1..45: mol_type = other RNA
aaaaaaaaaaaaaaaaaaaaaataaataaataaataaataaatat

SEQ ID NO: 8506 - RNA, 45 nt, synthetic construct
  source 1..45: mol_type = other RNA
aaaaaaaaaaaaaaaaaataaataaataaataaataaataaatat

SEQ ID NO: 8507 - RNA, 45 nt, synthetic construct
  source 1..45: mol_type = other RNA
aaaaaaaaaaaaaataaataaataaataaataaataaataaatat

SEQ ID NO: 8508 - RNA, 45 nt, synthetic construct
  source 1..45: mol_type = other RNA
aaatataaataaataaataaatatataaataaataaataaatata

SEQ ID NO: 8509 - RNA, 45 nt, synthetic construct
  source 1..45: mol_type = other RNA
aaatataaataaataaataaataaataaataaatatataaatata

SEQ ID NO: 8510 - RNA, 45 nt, synthetic construct
  source 1..45: mol_type = other RNA
aaatataaataaataaataaataaataaatatataaataaatata

SEQ ID NO: 8511 - RNA, 45 nt, synthetic construct
  source 1..45: mol_type = other RNA
aaatataaataaataaataaataaatatataaataaataaatata

SEQ ID NO: 8512 - RNA, 45 nt, synthetic construct
  source 1..45: mol_type = other RNA
aaatataaatatataaataaataaataaataaataaataaatata

SEQ ID NO: 8513 - RNA, 45 nt, synthetic construct
  source 1..45: mol_type = other RNA
aaatataaataaataaataaataaataaataaatataaatatata

SEQ ID NO: 8514 - RNA, 45 nt, synthetic construct
  source 1..45: mol_type = other RNA
aaatataaataaataaataaataaataaatataaataaatatata

SEQ ID NO: 8515 - RNA, 45 nt, synthetic construct
  source 1..45: mol_type = other RNA
aaataaatataaataaataaataaataaatataaataaatatata

SEQ ID NO: 8516 - RNA, 45 nt, synthetic construct
  source 1..45: mol_type = other RNA
aaataaatataaataaataaataaataaataaatataaatatata

SEQ ID NO: 8517 - RNA, 45 nt, synthetic construct
  source 1..45: mol_type = other RNA
aaataaatataaatataaataaataaataaataaataaatatata

SEQ ID NO: 8518 - RNA, 45 nt, synthetic construct
  source 1..45: mol_type = other RNA
aaataaatataaataaatataaataaataaataaataaatatata

SEQ ID NO: 8519 - RNA, 45 nt, synthetic construct
  source 1..45: mol_type = other RNA
aaataaataaatataaataaatataaataaataaataaatatata

SEQ ID NO: 8520 - RNA, 45 nt, synthetic construct
  source 1..45: mol_type = other RNA
aaaaaaaaaaaaaaaaaaaaaaaaaaaaaaaaaaaaaaaaaaata

SEQ ID NO: 8521 - RNA, 45 nt, synthetic construct
  source 1..45: mol_type = other RNA
aaaaaaaaaaaaaaaaaaaaaaaaaaaaaaaaaaaaaaataaata

SEQ ID NO: 8522 - RNA, 45 nt, synthetic construct
  source 1..45: mol_type = other RNA
aaaaaaaaaaaaaaaaaaaaaaaaaaaaatataaatataaatata

SEQ ID NO: 8523 - RNA, 45 nt, synthetic construct
  source 1..45: mol_type = other RNA
aaaaaaaaaaaaaaaaaaaaaaaaatataaatataaataaatata

SEQ ID NO: 8524 - RNA, 45 nt, synthetic construct
  source 1..45: mol_type = other RNA
aaaaaaaaaaaaaaaaaaaaaaaaataaatataaatataaatata

SEQ ID NO: 8525 - RNA, 45 nt, synthetic construct
  source 1..45: mol_type = other RNA
aaaaaaaaaaaaaaaaaaaaaaaaatataaataaatataaatata

SEQ ID NO: 8526 - RNA, 45 nt, synthetic construct
  source 1..45: mol_type = other RNA
aaatatatataaataaataaataaataaataaataaataaatata

SEQ ID NO: 8527 - RNA, 45 nt, synthetic construct
  source 1..45: mol_type = other RNA
aaaaaaaaaaaaaaaaaaaaatataaataaataaatataaatata

SEQ ID NO: 8528 - RNA, 45 nt, synthetic construct
  source 1..45: mol_type = other RNA
aaaaaaaaaaaaaaaaaaaaataaatataaataaatataaatata

SEQ ID NO: 8529 - RNA, 45 nt, synthetic construct
  source 1..45: mol_type = other RNA
aaaaaaaaaaaaaaaaaaaaataaataaatataaatataaatata

SEQ ID NO: 8530 - RNA, 45 nt, synthetic construct
  source 1..45: mol_type = other RNA
aaaaaaaaaaaaaaaaaaaaatataaatataaataaataaatata

SEQ ID NO: 8531 - RNA, 45 nt, synthetic construct
  source 1..45: mol_type = other RNA
aaaaaaaaaaaaaaaaaaaaaaaaaaataaataaataaataaata

SEQ ID NO: 8532 - RNA, 45 nt, synthetic construct
  source 1..45: mol_type = other RNA
aaaaaaaaaaaaaaaaataaatataaataaataaatataaatata

SEQ ID NO: 8533 - RNA, 45 nt, synthetic construct
  source 1..45: mol_type = other RNA
aaaaaaaaaaaaaaaaataaataaatataaataaatataaatata

SEQ ID NO: 8534 - RNA, 45 nt, synthetic construct
  source 1..45: mol_type = other RNA
aaaaaaaaaaaaaaaaataaataaataaatataaatataaatata

SEQ ID NO: 8535 - RNA, 45 nt, synthetic construct
  source 1..45: mol_type = other RNA
aaaaaaaaaaaaaaaaataaataaatataaatataaataaatata

SEQ ID NO: 8536 - RNA, 45 nt, synthetic construct
  source 1..45: mol_type = other RNA
aaaaaaaaaaaaaaaaataaatataaatataaataaataaatata

SEQ ID NO: 8537 - RNA, 46 nt, synthetic construct
  source 1..46: mol_type = other RNA
aaataaataaataaataaataaataaataaataaataaataaataa

SEQ ID NO: 8538 - RNA, 46 nt, synthetic construct
  source 1..46: mol_type = other RNA
aaaaaaaaaaaaaaaaaaaaaaaaaaaaaaaaaaaaaaaaaatata

SEQ ID NO: 8539 - RNA, 46 nt, synthetic construct
  source 1..46: mol_type = other RNA
aaaaaaaaaaaaaaaaaaaaaaaaaaaaaaaaaaaaaataaatata

SEQ ID NO: 8540 - RNA, 46 nt, synthetic construct
  source 1..46: mol_type = other RNA
aaaaaaaaaaaaaaaaaaaaaaaaaaaaaaaaaataaataaatata

SEQ ID NO: 8541 - RNA, 46 nt, synthetic construct
  source 1..46: mol_type = other RNA
aaaaaaaaaaaaaaaaaaaaaaaaaaaaaataaataaataaatata

SEQ ID NO: 8542 - RNA, 46 nt, synthetic construct
  source 1..46: mol_type = other RNA
aaaaaaaaaaaaaaaaaaaaaaaaaataaataaataaataaatata

SEQ ID NO: 8543 - RNA, 46 nt, synthetic construct
  source 1..46: mol_type = other RNA
aaaaaaaaaaaaaaaaaaaaaataaataaataaataaataaatata

SEQ ID NO: 8544 - RNA, 46 nt, synthetic construct
  source 1..46: mol_type = other RNA
aaataaataaataaataaataaataaataaataaataaataaatat

SEQ ID NO: 8545 - RNA, 46 nt, synthetic construct
  source 1..46: mol_type = other RNA
aaaaaaaaaaaaaaaaaaaaaaaaaaaaaaaaaaaatataaatata

SEQ ID NO: 8546 - RNA, 46 nt, synthetic construct
  source 1..46: mol_type = other RNA
aaaaaaaaaaaaaaaaaaaaaaaaaaaaaaaataaatataaatata

SEQ ID NO: 8547 - RNA, 46 nt, synthetic construct
  source 1..46: mol_type = other RNA
aaaaaaaaaaaaaaaaaaaaaaaaaaaaaaaatataaataaatata

SEQ ID NO: 8548 - RNA, 46 nt, synthetic construct
  source 1..46: mol_type = other RNA
aaaaaaaaaaaaaaaaaaaaaaaaaaaatataaataaataaatata

SEQ ID NO: 8549 - RNA, 46 nt, synthetic construct
  source 1..46: mol_type = other RNA
aaaaaaaaaaaaaaaaaaaaaaaaaaaataaatataaataaatata

SEQ ID NO: 8550 - RNA, 46 nt, synthetic construct
  source 1..46: mol_type = other RNA
aaaaaaaaaaaaaaaaaaaaaaaaaaaataaataaatataaatata

SEQ ID NO: 8551 - RNA, 46 nt, synthetic construct
  source 1..46: mol_type = other RNA
aaaaaaaaaaaaaaaaaaaaaaaataaatataaataaataaatata

SEQ ID NO: 8552 - RNA, 46 nt, synthetic construct
  source 1..46: mol_type = other RNA
aaaaaaaaaaaaaaaaaaaaaaaatataaataaataaataaatata

SEQ ID NO: 8553 - RNA, 46 nt, synthetic construct
  source 1..46: mol_type = other RNA
aaaaaaaaaaaaaaaaaaaaaaaataaataaataaatataaatata

SEQ ID NO: 8554 - RNA, 46 nt, synthetic construct
  source 1..46: mol_type = other RNA
aaaaaaaaaaaaaaaaaaaaaaaataaataaatataaataaatata

SEQ ID NO: 8555 - RNA, 46 nt, synthetic construct
  source 1..46: mol_type = other RNA
aaaaaaaaaaaaaaaaaaaataaataaatataaataaataaatata

SEQ ID NO: 8556 - RNA, 46 nt, synthetic construct
  source 1..46: mol_type = other RNA
aaaaaaaaaaaaaaaaaaaataaatataaataaataaataaatata

SEQ ID NO: 8557 - RNA, 46 nt, synthetic construct
  source 1..46: mol_type = other RNA
aaaaaaaaaaaaaaaaaaaataaataaataaatataaataaatata

SEQ ID NO: 8558 - RNA, 46 nt, synthetic construct
  source 1..46: mol_type = other RNA
aaaaaaaaaaaaaaaaaaaataaataaataaataaatataaatata

SEQ ID NO: 8559 - RNA, 46 nt, synthetic construct
  source 1..46: mol_type = other RNA
aaaaaaaaaaaaaaaaaaaatataaataaataaataaataaatata

SEQ ID NO: 8560 - RNA, 46 nt, synthetic construct
  source 1..46: mol_type = other RNA
aaataaaaaaaaaaaaaaaaaaaaaaaaaaaaaaaaaaaaaatata

SEQ ID NO: 8561 - RNA, 46 nt, synthetic construct
  source 1..46: mol_type = other RNA
aaaaaaaaaaaaaaaataaataaataaatataaataaataaatata

SEQ ID NO: 8562 - RNA, 46 nt, synthetic construct
  source 1..46: mol_type = other RNA
aaaaaaaaaaaaaaaataaataaataaataaatataaataaatata

SEQ ID NO: 8563 - RNA, 46 nt, synthetic construct
  source 1..46: mol_type = other RNA
aaaaaaaaaaaaaaaataaataaataaataaataaatataaatata

SEQ ID NO: 8564 - RNA, 46 nt, synthetic construct
  source 1..46: mol_type = other RNA
aaaaaaaaaaaaaaaataaatataaataaataaataaataaatata

SEQ ID NO: 8565 - RNA, 46 nt, synthetic construct
  source 1..46: mol_type = other RNA
aaaaaaaaaaaaaaaataaataaatataaataaataaataaatata

SEQ ID NO: 8566 - RNA, 46 nt, synthetic construct
  source 1..46: mol_type = other RNA
aaataaataaaaaaaaaaaaaaaaaaaaaaaaaaaaaaaaaatata

SEQ ID NO: 8567 - RNA, 46 nt, synthetic construct
  source 1..46: mol_type = other RNA
aaataaaaaaaaaaaaaaaaaaaaaaaaaaaaaaaaaataaatata

SEQ ID NO: 8568 - RNA, 46 nt, synthetic construct
  source 1..46: mol_type = other RNA
aaaaaaaaaaaataaataaataaataaatataaataaataaatata

SEQ ID NO: 8569 - RNA, 46 nt, synthetic construct
  source 1..46: mol_type = other RNA
aaaaaaaaaaaataaataaataaataaataaatataaataaatata

SEQ ID NO: 8570 - RNA, 46 nt, synthetic construct
  source 1..46: mol_type = other RNA
aaaaaaaaaaaataaataaataaatataaataaataaataaatata

SEQ ID NO: 8571 - RNA, 46 nt, synthetic construct
  source 1..46: mol_type = other RNA
aaaaaaaaaaaataaataaatataaataaataaataaataaatata

SEQ ID NO: 8572 - RNA, 46 nt, synthetic construct
  source 1..46: mol_type = other RNA
aaaaaaaaaaaataaataaataaataaataaataaatataaatata

SEQ ID NO: 8573 - RNA, 46 nt, synthetic construct
  source 1..46: mol_type = other RNA
aaataaataaaaaaaaaaaaaaaaaaaaaaaaaaaaaataaatata

SEQ ID NO: 8574 - RNA, 46 nt, synthetic construct
  source 1..46: mol_type = other RNA
aaataaataaataaaaaaaaaaaaaaaaaaaaaaaaaaaaaatata

SEQ ID NO: 8575 - RNA, 46 nt, synthetic construct
  source 1..46: mol_type = other RNA
aaataaaaaaaaaaaaaaaaaaaaaaaaaaaaaataaataaatata

SEQ ID NO: 8576 - RNA, 46 nt, synthetic construct
  source 1..46: mol_type = other RNA
aaaaaaaataaataaataaataaataaataaatataaataaatata

SEQ ID NO: 8577 - RNA, 46 nt, synthetic construct
  source 1..46: mol_type = other RNA
aaaaaaaataaataaataaataaataaatataaataaataaatata

SEQ ID NO: 8578 - RNA, 46 nt, synthetic construct
  source 1..46: mol_type = other RNA
aaaaaaaataaataaataaataaatataaataaataaataaatata

SEQ ID NO: 8579 - RNA, 46 nt, synthetic construct
  source 1..46: mol_type = other RNA
aaaaaaaataaataaataaatataaataaataaataaataaatata

SEQ ID NO: 8580 - RNA, 46 nt, synthetic construct
  source 1..46: mol_type = other RNA
aaaaaaaataaataaataaataaataaataaataaatataaatata

SEQ ID NO: 8581 - RNA, 46 nt, synthetic construct
  source 1..46: mol_type = other RNA
aaaaaaaatataaataaataaataaataaataaataaataaatata

SEQ ID NO: 8582 - RNA, 46 nt, synthetic construct
  source 1..46: mol_type = other RNA
aaaaaaaaaaaaaaaaaaaaaaaaaaaaaaaaaaaaaaaatatata

SEQ ID NO: 8583 - RNA, 46 nt, synthetic construct
  source 1..46: mol_type = other RNA
aaataaataaataaataaaaaaaaaaaaaaaaaaaaaaaaaatata

SEQ ID NO: 8584 - RNA, 46 nt, synthetic construct
  source 1..46: mol_type = other RNA
aaataaataaataaaaaaaaaaaaaaaaaaaaaaaaaataaatata

SEQ ID NO: 8585 - RNA, 46 nt, synthetic construct
  source 1..46: mol_type = other RNA
aaataaaaaaaaaaaaaaaaaaaaaaaaaataaataaataaatata

SEQ ID NO: 8586 - RNA, 46 nt, synthetic construct
  source 1..46: mol_type = other RNA
aaataaataaaaaaaaaaaaaaaaaaaaaaaaaataaataaatata

SEQ ID NO: 8587 - RNA, 46 nt, synthetic construct
  source 1..46: mol_type = other RNA
aaaataaataaataaataaataaataaataaatataaataaatata

SEQ ID NO: 8588 - RNA, 46 nt, synthetic construct
  source 1..46: mol_type = other RNA
aaaataaataaataaataaataaataaatataaataaataaatata

SEQ ID NO: 8589 - RNA, 46 nt, synthetic construct
  source 1..46: mol_type = other RNA
aaaataaataaataaataaatataaataaataaataaataaatata

SEQ ID NO: 8590 - RNA, 46 nt, synthetic construct
  source 1..46: mol_type = other RNA
aaaataaataaataaataaataaatataaataaataaataaatata

SEQ ID NO: 8591 - RNA, 46 nt, synthetic construct
  source 1..46: mol_type = other RNA
aaaataaataaataaataaataaataaataaataaatataaatata

SEQ ID NO: 8592 - RNA, 46 nt, synthetic construct
  source 1..46: mol_type = other RNA
aaataaataaataaataaataaaaaaaaaaaaaaaaaaaaaatata

SEQ ID NO: 8593 - RNA, 46 nt, synthetic construct
  source 1..46: mol_type = other RNA
aaataaataaataaataaaaaaaaaaaaaaaaaaaaaataaatata

SEQ ID NO: 8594 - RNA, 46 nt, synthetic construct
  source 1..46: mol_type = other RNA
aaataaataaaaaaaaaaaaaaaaaaaaaataaataaataaatata

SEQ ID NO: 8595 - RNA, 46 nt, synthetic construct
  source 1..46: mol_type = other RNA
aaaaaaaaaaaaaaaaaaaaaaaaaaaaaaaaaaaataaatatata

SEQ ID NO: 8596 - RNA, 46 nt, synthetic construct
  source 1..46: mol_type = other RNA
aaaaaaaaaaaaaaaaaaaaaaaaaaaaaaaaaaaaaaaaaaataa

SEQ ID NO: 8597 - RNA, 46 nt, synthetic construct
  source 1..46: mol_type = other RNA
aaaaaaaaaaaaaaaaaaaaaaaaaaaaaaaataaataaatatata

SEQ ID NO: 8598 - RNA, 46 nt, synthetic construct
  source 1..46: mol_type = other RNA
aaataaataaataaataaaaaaaaaaaaaaaaaataaataaatata

SEQ ID NO: 8599 - RNA, 46 nt, synthetic construct
  source 1..46: mol_type = other RNA
aaataaataaataaataaataaaaaaaaaaaaaaaaaataaatata

SEQ ID NO: 8600 - RNA, 46 nt, synthetic construct
  source 1..46: mol_type = other RNA
aaataaataaataaataaataaataaaaaaaaaaaaaaaaaatata

SEQ ID NO: 8601 - RNA, 46 nt, synthetic construct
  source 1..46: mol_type = other RNA
aaataaataaataaaaaaaaaaaaaaaaaataaataaataaatata

SEQ ID NO: 8602 - RNA, 46 nt, synthetic construct
  source 1..46: mol_type = other RNA
aaataaataaaaaaaaaaaaaaaaaataaataaataaataaatata

SEQ ID NO: 8603 - RNA, 46 nt, synthetic construct
  source 1..46: mol_type = other RNA
aaaaaaaaaaaaaaaaaaaaaaaaaaaaaaaaaaaaaaataaataa

SEQ ID NO: 8604 - RNA, 46 nt, synthetic construct
  source 1..46: mol_type = other RNA
aaataaataaataaataaataaaaaaaaaaaaaataaataaatata

SEQ ID NO: 8605 - RNA, 46 nt, synthetic construct
  source 1..46: mol_type = other RNA
aaataaataaataaataaataaataaaaaaaaaaaaaataaatata

SEQ ID NO: 8606 - RNA, 46 nt, synthetic construct
  source 1..46: mol_type = other RNA
aaataaataaataaataaaaaaaaaaaaaataaataaataaatata

SEQ ID NO: 8607 - RNA, 46 nt, synthetic construct
  source 1..46: mol_type = other RNA
aaataaataaataaataaataaataaataaaaaaaaaaaaaatata

SEQ ID NO: 8608 - RNA, 46 nt, synthetic construct
  source 1..46: mol_type = other RNA
aaataaataaaaaaaaaaaaaataaataaataaataaataaatata

SEQ ID NO: 8609 - RNA, 46 nt, synthetic construct
  source 1..46: mol_type = other RNA
aaaaaaaaaaaaaaaaaaaaaaaaaaaataaataaataaatatata

SEQ ID NO: 8610 - RNA, 46 nt, synthetic construct
  source 1..46: mol_type = other RNA
aaaaaaaaaaaaaaaaaaaaaaaaaaaaaaaaaaataaataaataa

SEQ ID NO: 8611 - RNA, 46 nt, synthetic construct
  source 1..46: mol_type = other RNA
aaataaataaataaataaataaataaaaaaaaaataaataaatata

SEQ ID NO: 8612 - RNA, 46 nt, synthetic construct
  source 1..46: mol_type = other RNA
aaataaataaataaataaataaataaataaaaaaaaaataaatata

SEQ ID NO: 8613 - RNA, 46 nt, synthetic construct
  source 1..46: mol_type = other RNA
aaataaataaataaataaataaaaaaaaaataaataaataaatata

SEQ ID NO: 8614 - RNA, 46 nt, synthetic construct
  source 1..46: mol_type = other RNA
aaataaataaataaataaataaataaataaataaaaaaaaaatata

SEQ ID NO: 8615 - RNA, 46 nt, synthetic construct
  source 1..46: mol_type = other RNA
aaataaataaaaaaaaaataaataaataaataaataaataaatata

SEQ ID NO: 8616 - RNA, 46 nt, synthetic construct
  source 1..46: mol_type = other RNA
aaaaaaaaaaaaaaaaaaaaaaaataaataaataaataaatatata

SEQ ID NO: 8617 - RNA, 46 nt, synthetic construct
  source 1..46: mol_type = other RNA
aaaaaaaaaaaaaaaaaaaaaaaaaaaaaaaaaaaaaaaaaataaa

SEQ ID NO: 8618 - RNA, 46 nt, synthetic construct
  source 1..46: mol_type = other RNA
aaaaaaaaaaaaaaaaaaaaaaaaaaaaaaataaataaataaataa

SEQ ID NO: 8619 - RNA, 46 nt, synthetic construct
  source 1..46: mol_type = other RNA
aaataaataaataaataaataaataaataaaaaataaataaatata

SEQ ID NO: 8620 - RNA, 46 nt, synthetic construct
  source 1..46: mol_type = other RNA
aaataaataaataaataaataaataaataaataaaaaataaatata

SEQ ID NO: 8621 - RNA, 46 nt, synthetic construct
  source 1..46: mol_type = other RNA
aaataaataaataaataaataaataaaaaataaataaataaatata

SEQ ID NO: 8622 - RNA, 46 nt, synthetic construct
  source 1..46: mol_type = other RNA
aaataaataaataaataaataaaaaataaataaataaataaatata

SEQ ID NO: 8623 - RNA, 46 nt, synthetic construct
  source 1..46: mol_type = other RNA
aaataaataaataaataaataaataaataaataaataaaaaatata

SEQ ID NO: 8624 - RNA, 46 nt, synthetic construct
  source 1..46: mol_type = other RNA
aaaaaaaaaaaaaaaaaaaaaaaaaaaaaaaaaaaaaataaataaa

SEQ ID NO: 8625 - RNA, 46 nt, synthetic construct
  source 1..46: mol_type = other RNA
aaaaaaaaaaaaaaaaaaaaaaaaaaataaataaataaataaataa

SEQ ID NO: 8626 - RNA, 46 nt, synthetic construct
  source 1..46: mol_type = other RNA
aaaaaaaaaaaaaaaaaaaaaaaaaaaaaaaaaataaataaataaa

SEQ ID NO: 8627 - RNA, 46 nt, synthetic construct
  source 1..46: mol_type = other RNA
aaaaaaaaaaaataaataaataaataaataaataaataaatatata

SEQ ID NO: 8628 - RNA, 46 nt, synthetic construct
  source 1..46: mol_type = other RNA
aaaaaaaaaaaaaaaaaaaaaaaaaaaaaataaataaataaataaa

SEQ ID NO: 8629 - RNA, 46 nt, synthetic construct
  source 1..46: mol_type = other RNA
aaaaaaaataaataaataaataaataaataaataaataaatatata

SEQ ID NO: 8630 - RNA, 46 nt, synthetic construct
  source 1..46: mol_type = other RNA
aaaaaaaaaaaaaaaaaaaaaaaaaataaataaataaataaataaa

SEQ ID NO: 8631 - RNA, 46 nt, synthetic construct
  source 1..46: mol_type = other RNA
aaaaaaaaaaaaaaataaataaataaataaataaataaataaataa

SEQ ID NO: 8632 - RNA, 46 nt, synthetic construct
  source 1..46: mol_type = other RNA
aaaataaataaataaataaataaataaataaataaataaatatata

SEQ ID NO: 8633 - RNA, 46 nt, synthetic construct
  source 1..46: mol_type = other RNA
aaaaaaaaaaaaaaaaaaaaaataaataaataaataaataaataaa

SEQ ID NO: 8634 - RNA, 46 nt, synthetic construct
  source 1..46: mol_type = other RNA
aaaaaaaaaaataaataaataaataaataaataaataaataaataa

SEQ ID NO: 8635 - RNA, 46 nt, synthetic construct
  source 1..46: mol_type = other RNA
aaaaaaataaataaataaataaataaataaataaataaataaataa

SEQ ID NO: 8636 - RNA, 46 nt, synthetic construct
  source 1..46: mol_type = other RNA
aaaaaaaaaaaaaaaaaaaaaaaaaaaaaaaaaaaaaaaaaaatat

SEQ ID NO: 8637 - RNA, 46 nt, synthetic construct
  source 1..46: mol_type = other RNA
aaaaacaaaaaacaaaaaaaacaaaaaaaaaaccaaaaaaacaaaa

SEQ ID NO: 8638 - RNA, 47 nt, synthetic construct
  source 1..47: mol_type = other RNA
aaaaaaaaaaaaaaaaaaaaaaaaaaaaaaaaaaaaaaaaaaatata

SEQ ID NO: 8639 - RNA, 47 nt, synthetic construct
  source 1..47: mol_type = other RNA
aaaaaaaaaaaaaaaaaaaaaaaaaaaaaaaaaaaaaaataaatata

SEQ ID NO: 8640 - RNA, 47 nt, synthetic construct
  source 1..47: mol_type = other RNA
aaaaaaaaaaaaaaaaaaaaaaaaaaaaaaaaaaataaataaatata

SEQ ID NO: 8641 - RNA, 47 nt, synthetic construct
  source 1..47: mol_type = other RNA
aaaaaaaaaaaaaaaaaaaaaaaaaaaaaaataaataaataaatata

SEQ ID NO: 8642 - RNA, 47 nt, synthetic construct
  source 1..47: mol_type = other RNA
aaaaaaaaaaaaaaaaaaaaaaaaaaataaataaataaataaatata

SEQ ID NO: 8643 - RNA, 47 nt, synthetic construct
  source 1..47: mol_type = other RNA
aaaaaaaaaaaaaaaaaaaaaaataaataaataaataaataaatata

SEQ ID NO: 8644 - RNA, 47 nt, synthetic construct
  source 1..47: mol_type = other RNA
aaaaaaaaaaaaaaaaaaataaataaataaataaataaataaatata

SEQ ID NO: 8645 - RNA, 47 nt, synthetic construct
  source 1..47: mol_type = other RNA
aaaaaaaaaaaaaaataaataaataaataaataaataaataaatata

SEQ ID NO: 8646 - RNA, 47 nt, synthetic construct
  source 1..47: mol_type = other RNA
aaaaaaaaaaataaataaataaataaataaataaataaataaatata

SEQ ID NO: 8647 - RNA, 47 nt, synthetic construct
  source 1..47: mol_type = other RNA
aaaaaaataaataaataaataaataaataaataaataaataaatata

SEQ ID NO: 8648 - RNA, 47 nt, synthetic construct
  source 1..47: mol_type = other RNA
aaaaaaaaaaaaaaaaaaaaaaaaaaaaaaaaaaaaatataaatata

SEQ ID NO: 8649 - RNA, 47 nt, synthetic construct
  source 1..47: mol_type = other RNA
aaaaaaaaaaaaaaaaaaaaaaaaaaaaaaaaataaatataaatata

SEQ ID NO: 8650 - RNA, 47 nt, synthetic construct
  source 1..47: mol_type = other RNA
aaaaaaaaaaaaaaaaaaaaaaaaaaaaaaaaatataaataaatata

SEQ ID NO: 8651 - RNA, 47 nt, synthetic construct
  source 1..47: mol_type = other RNA
aaaaaaaaaaaaaaaaaaaaaaaaaaaaataaataaatataaatata

SEQ ID NO: 8652 - RNA, 47 nt, synthetic construct
  source 1..47: mol_type = other RNA
aaaaaaaaaaaaaaaaaaaaaaaaataaataaataaatataaatata

SEQ ID NO: 8653 - RNA, 47 nt, synthetic construct
  source 1..47: mol_type = other RNA
aaaaaaaaaaaaaaaaaaaaataaataaatataaataaataaatata

SEQ ID NO: 8654 - RNA, 47 nt, synthetic construct
  source 1..47: mol_type = other RNA
aaaaaaaaaaaaaaaaaaaaataaatataaataaataaataaatata

SEQ ID NO: 8655 - RNA, 47 nt, synthetic construct
  source 1..47: mol_type = other RNA
aaataaaaaaaaaaaaaaaaaaaaaaaaaaaaaaaaaaaaaaatata

SEQ ID NO: 8656 - RNA, 47 nt, synthetic construct
  source 1..47: mol_type = other RNA
aaaaaaaaaaaaaaaaataaataaataaatataaataaataaatata

SEQ ID NO: 8657 - RNA, 47 nt, synthetic construct
  source 1..47: mol_type = other RNA
aaaaaaaaaaaaaaaaataaataaatataaataaataaataaatata

SEQ ID NO: 8658 - RNA, 47 nt, synthetic construct
  source 1..47: mol_type = other RNA
aaataaataaaaaaaaaaaaaaaaaaaaaaaaaaaaaaaaaaatata

SEQ ID NO: 8659 - RNA, 47 nt, synthetic construct
  source 1..47: mol_type = other RNA
aaataaaaaaaaaaaaaaaaaaaaaaaaaaaaaaaaaaataaatata

SEQ ID NO: 8660 - RNA, 47 nt, synthetic construct
  source 1..47: mol_type = other RNA
aaaaaaaaaaaaataaataaataaataaatataaataaataaatata

SEQ ID NO: 8661 - RNA, 47 nt, synthetic construct
  source 1..47: mol_type = other RNA
aaaaaaaaaaaaataaataaataaatataaataaataaataaatata

SEQ ID NO: 8662 - RNA, 47 nt, synthetic construct
  source 1..47: mol_type = other RNA
aaataaaaaaaaaaaaaaaaaaaaaaaaaaaaaaataaataaatata

SEQ ID NO: 8663 - RNA, 47 nt, synthetic construct
  source 1..47: mol_type = other RNA
aaaaaaaaataaataaataaataaataaatataaataaataaatata

SEQ ID NO: 8664 - RNA, 47 nt, synthetic construct
  source 1..47: mol_type = other RNA
aaaaaaaaataaataaataaataaatataaataaataaataaatata

SEQ ID NO: 8665 - RNA, 47 nt, synthetic construct
  source 1..47: mol_type = other RNA
aaataaaaaaaaaaaaaaaaaaaaaaaaaaataaataaataaatata

SEQ ID NO: 8666 - RNA, 47 nt, synthetic construct
  source 1..47: mol_type = other RNA
aaaaataaataaataaataaataaataaatataaataaataaatata

SEQ ID NO: 8667 - RNA, 47 nt, synthetic construct
  source 1..47: mol_type = other RNA
aaaaataaataaataaataaataaatataaataaataaataaatata

SEQ ID NO: 8668 - RNA, 47 nt, synthetic construct
  source 1..47: mol_type = other RNA
aaaaatataaataaataaataaataaataaataaataaataaatata

SEQ ID NO: 8669 - RNA, 47 nt, synthetic construct
  source 1..47: mol_type = other RNA
aaaaaaaaaaaaaaaaaaaaaaaaaaaaaaaaaaaaaaaaaaaataa

SEQ ID NO: 8670 - RNA, 47 nt, synthetic construct
  source 1..47: mol_type = other RNA
aaataaaaaaaaaaaaaaaaaaataaataaataaataaataaatata

SEQ ID NO: 8671 - RNA, 47 nt, synthetic construct
  source 1..47: mol_type = other RNA
aaaaaaaaaaaaaaaaaaaaaaaaaaaaaaaaaaaaaaaataaataa

SEQ ID NO: 8672 - RNA, 47 nt, synthetic construct
  source 1..47: mol_type = other RNA
aaataaataaaaaaaaaaaaaaataaataaataaataaataaatata

SEQ ID NO: 8673 - RNA, 47 nt, synthetic construct
  source 1..47: mol_type = other RNA
aaaaaaaaaaaaaaaaaaaaaaaaaaaaataaataaataaatatata

SEQ ID NO: 8674 - RNA, 47 nt, synthetic construct
  source 1..47: mol_type = other RNA
aaataaaaaaaaaaaaaaataaataaataaataaataaataaatata

SEQ ID NO: 8675 - RNA, 47 nt, synthetic construct
  source 1..47: mol_type = other RNA
aaataaataaataaaaaaaaaaataaataaataaataaataaatata

SEQ ID NO: 8676 - RNA, 47 nt, synthetic construct
  source 1..47: mol_type = other RNA
aaaaaaaaaaaaaaaaaaaaaaaaaaaaaaaaaaaaaaaaaaataaa

SEQ ID NO: 8677 - RNA, 47 nt, synthetic construct
  source 1..47: mol_type = other RNA
aaaaaaaaaaaaaaaaaaaaataaataaataaataaataaatatata

SEQ ID NO: 8678 - RNA, 47 nt, synthetic construct
  source 1..47: mol_type = other RNA
aaaaaaaaaaaaaaaaaaaaaaaaaaaaaaaaaaaaaaataaataaa

SEQ ID NO: 8679 - RNA, 47 nt, synthetic construct
  source 1..47: mol_type = other RNA
aaaaaaaaaaaaaaaaaaaaaaaaaaaataaataaataaataaataa

SEQ ID NO: 8680 - RNA, 47 nt, synthetic construct
  source 1..47: mol_type = other RNA
aaaaaaaaaaaaaaaaataaataaataaataaataaataaatatata

SEQ ID NO: 8681 - RNA, 47 nt, synthetic construct
  source 1..47: mol_type = other RNA
aaaaaaaaaaaaaaaaaaaaaaaaaaaaaaaaaaataaataaataaa

SEQ ID NO: 8682 - RNA, 47 nt, synthetic construct
  source 1..47: mol_type = other RNA
aaaaaaaaaaaaaaaaaaaaaaaataaataaataaataaataaataa

SEQ ID NO: 8683 - RNA, 47 nt, synthetic construct
  source 1..47: mol_type = other RNA
aaaaaaaaaaaaataaataaataaataaataaataaataaatatata

SEQ ID NO: 8684 - RNA, 47 nt, synthetic construct
  source 1..47: mol_type = other RNA
aaaaaaaaaaaaaaaaaaaataaataaataaataaataaataaataa

SEQ ID NO: 8685 - RNA, 47 nt, synthetic construct
  source 1..47: mol_type = other RNA
aaaaaaaaataaataaataaataaataaataaataaataaatatata

SEQ ID NO: 8686 - RNA, 47 nt, synthetic construct
  source 1..47: mol_type = other RNA
aaaaaaaaaaaaaaaataaataaataaataaataaataaataaataa

SEQ ID NO: 8687 - RNA, 47 nt, synthetic construct
  source 1..47: mol_type = other RNA
aaaaaaaaaaaaaaaaaaaaaaaaaaaaaaaaaaaaaaaaaaaatat

SEQ ID NO: 8688 - RNA, 47 nt, synthetic construct
  source 1..47: mol_type = other RNA
aaaaaaaaaaaaaaaaaaaaaaaaaaaaaaaaaaaaaaaataaatat

SEQ ID NO: 8689 - RNA, 47 nt, synthetic construct
  source 1..47: mol_type = other RNA
aaaaaaaaaaataaataaataaataaataaataaataaataaataaa

SEQ ID NO: 8690 - RNA, 47 nt, synthetic construct
  source 1..47: mol_type = other RNA
aaaaaaaaaaaaaaaaaaaaaaaaaaaataaataaataaataaatat

SEQ ID NO: 8691 - RNA, 47 nt, synthetic construct
  source 1..47: mol_type = other RNA
aaaaaaaaaaaaaaaaaaaaaaaaaaaaaaaaaaaaaaaaaaaaata

SEQ ID NO: 8692 - RNA, 47 nt, synthetic construct
  source 1..47: mol_type = other RNA
aaaaaaaaaaaaaaaaaaaaaaaaaaaaaaaaaaaaaaaaataaata

SEQ ID NO: 8693 - RNA, 47 nt, synthetic construct
  source 1..47: mol_type = other RNA
aaaaaaaaaaaaaaaaaaaaaaaaaaaaaaatataaatataaatata

SEQ ID NO: 8694 - RNA, 47 nt, synthetic construct
  source 1..47: mol_type = other RNA
aaaaaaaaaaaaaaaaaaaaaaaaaaatataaataaatataaatata

SEQ ID NO: 8695 - RNA, 47 nt, synthetic construct
  source 1..47: mol_type = other RNA
aaaaaaaaaaaaaaaaaaaaaaaaaaataaatataaatataaatata

SEQ ID NO: 8696 - RNA, 47 nt, synthetic construct
  source 1..47: mol_type = other RNA
aaaaaaaaaaaaaaaaaaaaaaataaataaatataaatataaatata

SEQ ID NO: 8697 - RNA, 47 nt, synthetic construct
  source 1..47: mol_type = other RNA
aaaaaaaaaaaaaaaaaaaaaaataaatataaataaatataaatata

SEQ ID NO: 8698 - RNA, 47 nt, synthetic construct
  source 1..47: mol_type = other RNA
aaaaaaaaaaaaaaaaaaaaaaatataaataaataaatataaatata

SEQ ID NO: 8699 - RNA, 47 nt, synthetic construct
  source 1..47: mol_type = other RNA
aaaaaaaaaaaaaaaaaaataaataaataaatataaatataaatata

SEQ ID NO: 8700 - RNA, 47 nt, synthetic construct
  source 1..47: mol_type = other RNA
aaaaaaaaaaaaaaaaaaatataaataaataaataaatataaatata

SEQ ID NO: 8701 - RNA, 47 nt, synthetic construct
  source 1..47: mol_type = other RNA
aaaaaaaaaaaaaaaaaaatataaataaatataaataaataaatata

SEQ ID NO: 8702 - RNA, 47 nt, synthetic construct
  source 1..47: mol_type = other RNA
aaaaaaaaaaaaaaaaaaatataaatataaataaataaataaatata

SEQ ID NO: 8703 - RNA, 47 nt, synthetic construct
  source 1..47: mol_type = other RNA
aaaaaaaaaaaaaaaaaaataaataaatataaataaatataaatata

SEQ ID NO: 8704 - RNA, 47 nt, synthetic construct
  source 1..47: mol_type = other RNA
aaatataaaaaaaaaaaaaaaaaaaaaaaaaaaaaaaaaaaaatata

SEQ ID NO: 8705 - RNA, 47 nt, synthetic construct
  source 1..47: mol_type = other RNA
aaaaaaaaaaaaaaataaataaataaataaatataaatataaatata

SEQ ID NO: 8706 - RNA, 47 nt, synthetic construct
  source 1..47: mol_type = other RNA
aaaaaaaaaaaaaaataaatataaataaatataaataaataaatata

SEQ ID NO: 8707 - RNA, 47 nt, synthetic construct
  source 1..47: mol_type = other RNA
aaaaaaaaaaaaaaataaatataaatataaataaataaataaatata

SEQ ID NO: 8708 - RNA, 47 nt, synthetic construct
  source 1..47: mol_type = other RNA
aaataaaaaaaaaaaaaaaaaaaaaaaaaaaaaaaaatataaatata

SEQ ID NO: 8709 - RNA, 47 nt, synthetic construct
  source 1..47: mol_type = other RNA
aaatataaaaaaaaaaaaaaaaaaaaaaaaaaaaaaaaataaatata

SEQ ID NO: 8710 - RNA, 47 nt, synthetic construct
  source 1..47: mol_type = other RNA
aaaaaaaaaaataaataaatataaataaatataaataaataaatata

SEQ ID NO: 8711 - RNA, 47 nt, synthetic construct
  source 1..47: mol_type = other RNA
aaaaaaaaaaataaataaatataaatataaataaataaataaatata

SEQ ID NO: 8712 - RNA, 47 nt, synthetic construct
  source 1..47: mol_type = other RNA
aaaaaaaaaaatataaataaataaataaatataaataaataaatata

SEQ ID NO: 8713 - RNA, 47 nt, synthetic construct
  source 1..47: mol_type = other RNA
aaaaaaaaaaataaataaataaatataaatataaataaataaatata

SEQ ID NO: 8714 - RNA, 47 nt, synthetic construct
  source 1..47: mol_type = other RNA
aaataaaaaaaaaaaaaaaaaaaaaaaaaaaaataaatataaatata

SEQ ID NO: 8715 - RNA, 47 nt, synthetic construct
  source 1..47: mol_type = other RNA
aaataaataaaaaaaaaaaaaaaaaaaaaaaaaaaaatataaatata

SEQ ID NO: 8716 - RNA, 47 nt, synthetic construct
  source 1..47: mol_type = other RNA
aaaaaaataaataaataaatataaataaatataaataaataaatata

SEQ ID NO: 8717 - RNA, 47 nt, synthetic construct
  source 1..47: mol_type = other RNA
aaaaaaataaataaataaatataaatataaataaataaataaatata

SEQ ID NO: 8718 - RNA, 47 nt, synthetic construct
  source 1..47: mol_type = other RNA
aaaaaaataaataaataaataaatataaatataaataaataaatata

SEQ ID NO: 8719 - RNA, 47 nt, synthetic construct
  source 1..47: mol_type = other RNA
aaataaaaaaaaaaaaaaaaaaaaaaaaataaataaatataaatata

SEQ ID NO: 8720 - RNA, 47 nt, synthetic construct
  source 1..47: mol_type = other RNA
aaataaataaaaaaaaaaaaaaaaaaaaaaaaataaatataaatata

SEQ ID NO: 8721 - RNA, 47 nt, synthetic construct
  source 1..47: mol_type = other RNA
aaataaataaaaaaaaaaaaaaaaaaaaataaataaatataaatata

SEQ ID NO: 8722 - RNA, 47 nt, synthetic construct
  source 1..47: mol_type = other RNA
aaaaaaaaaaaaaaaaaaaaaaaaaaaaaaaaaaatatataaatata

SEQ ID NO: 8723 - RNA, 47 nt, synthetic construct
  source 1..47: mol_type = other RNA
aaaaaaaaaaaaaaaaaaaaaaaaaaaaaaaaaaatataaatatata

SEQ ID NO: 8724 - RNA, 47 nt, synthetic construct
  source 1..47: mol_type = other RNA
aaaaaaaaaaaaaaaaaaaaaaaaaaaaaaaaaaaaaaaaaatataa

SEQ ID NO: 8725 - RNA, 47 nt, synthetic construct
  source 1..47: mol_type = other RNA
aaataaataaaaaaaaaaaaaaaaataaataaataaatataaatata

SEQ ID NO: 8726 - RNA, 47 nt, synthetic construct
  source 1..47: mol_type = other RNA
aaaaaaaaaaaaaaaaaaaaaaaaaaaaaaataaatataaatatata

SEQ ID NO: 8727 - RNA, 47 nt, synthetic construct
  source 1..47: mol_type = other RNA
aaaaaaaaaaaaaaaaaaaaaaaaaaataaataaatataaatatata

SEQ ID NO: 8728 - RNA, 47 nt, synthetic construct
  source 1..47: mol_type = other RNA
aaataaatataaaaaaaaaaaaataaataaataaataaataaatata

SEQ ID NO: 8729 - RNA, 47 nt, synthetic construct
  source 1..47: mol_type = other RNA
aaataaataaaaaaaaaaaaatataaataaataaataaataaatata

SEQ ID NO: 8730 - RNA, 47 nt, synthetic construct
  source 1..47: mol_type = other RNA
aaatataaaaaaaaaaaaataaataaataaataaataaataaatata

SEQ ID NO: 8731 - RNA, 47 nt, synthetic construct
  source 1..47: mol_type = other RNA
aaaaaaaaaaaaaaaaaaaaaaaaaaaaaaaaaataaataaatataa

SEQ ID NO: 8732 - RNA, 47 nt, synthetic construct
  source 1..47: mol_type = other RNA
aaaaaaaaaaaaaaaaaaaaaaaaaaaaaaaaaataaatataaataa

SEQ ID NO: 8733 - RNA, 47 nt, synthetic construct
  source 1..47: mol_type = other RNA
aaataaataaataaaaaaaaatataaataaataaataaataaatata

SEQ ID NO: 8734 - RNA, 47 nt, synthetic construct
  source 1..47: mol_type = other RNA
aaaaaaaaaaaaaaaaaaaaaaataaataaataaatataaatatata

SEQ ID NO: 8735 - RNA, 47 nt, synthetic construct
  source 1..47: mol_type = other RNA
aaaaaaaaaaaaaaaaaaaaaaataaataaatataaataaatatata

SEQ ID NO: 8736 - RNA, 47 nt, synthetic construct
  source 1..47: mol_type = other RNA
aaaaaaaaaaaaaaaaaaaaaaataaataaataaatatataaatata

SEQ ID NO: 8737 - RNA, 47 nt, synthetic construct
  source 1..47: mol_type = other RNA
aaaaaaaaaaaaaaaaaaaaaaaaaaaaaaaaaaaaaaaaatataaa

SEQ ID NO: 8738 - RNA, 48 nt, synthetic construct
  source 1..48: mol_type = other RNA
aaaaaaaaaaaaaaaaaaaaaaaaaaaaaaaaaaaaaaaaaaaatata

SEQ ID NO: 8739 - RNA, 48 nt, synthetic construct
  source 1..48: mol_type = other RNA
aaaaaaaaaaaaaaaaaaaaaaaaaaaaaaaaaaaaaaaataaatata

SEQ ID NO: 8740 - RNA, 48 nt, synthetic construct
  source 1..48: mol_type = other RNA
aaaaaaaaaaaaaaaaaaaaaaaaaaaaaaaaaaaataaataaatata

SEQ ID NO: 8741 - RNA, 48 nt, synthetic construct
  source 1..48: mol_type = other RNA
aaaaaaaaaaaaaaaaaaaaaaaaaaaaaaaataaataaataaatata

SEQ ID NO: 8742 - RNA, 48 nt, synthetic construct
  source 1..48: mol_type = other RNA
aaaaaaaaaaaaaaaaaaaaaaaaaaaataaataaataaataaatata

SEQ ID NO: 8743 - RNA, 48 nt, synthetic construct
  source 1..48: mol_type = other RNA
aaaaaaaaaaaaaaaaaaaaaaaataaataaataaataaataaatata

SEQ ID NO: 8744 - RNA, 48 nt, synthetic construct
  source 1..48: mol_type = other RNA
aaaaaaaaaaaaaaaataaataaataaataaataaataaataaatata

SEQ ID NO: 8745 - RNA, 48 nt, synthetic construct
  source 1..48: mol_type = other RNA
aaaaaaaaaaaataaataaataaataaataaataaataaataaatata

SEQ ID NO: 8746 - RNA, 48 nt, synthetic construct
  source 1..48: mol_type = other RNA
aaataaataaatataaataaataaataaataaataaataaataaataa

SEQ ID NO: 8747 - RNA, 48 nt, synthetic construct
  source 1..48: mol_type = other RNA
aaaaaaaaaaaaaaaaaaaaaaaaaaaaaaaaaatataaataaatata

SEQ ID NO: 8748 - RNA, 48 nt, synthetic construct
  source 1..48: mol_type = other RNA
aaaaaaaaaaaaaaaaaaaaaaaaaaaaaatataaataaataaatata

SEQ ID NO: 8749 - RNA, 48 nt, synthetic construct
  source 1..48: mol_type = other RNA
aaaaaaaaaaaaaaaaaaaaaaaaaaaaaataaatataaataaatata

SEQ ID NO: 8750 - RNA, 48 nt, synthetic construct
  source 1..48: mol_type = other RNA
aaaaaaaaaaaaaaaaaaaaaaaaaaaaaataaataaatataaatata

SEQ ID NO: 8751 - RNA, 48 nt, synthetic construct
  source 1..48: mol_type = other RNA
aaaaaaaaaaaaaaaaaaaaaaaaaatataaataaataaataaatata

SEQ ID NO: 8752 - RNA, 48 nt, synthetic construct
  source 1..48: mol_type = other RNA
aaaaaaaaaaaaaaaaaaaaaaaaaataaataaataaatataaatata

SEQ ID NO: 8753 - RNA, 48 nt, synthetic construct
  source 1..48: mol_type = other RNA
aaaaaaaaaaaaaaaaaaaaaaaaaataaataaatataaataaatata

SEQ ID NO: 8754 - RNA, 48 nt, synthetic construct
  source 1..48: mol_type = other RNA
aaaaaaaaaaaaaaaaaaaaaataaatataaataaataaataaatata

SEQ ID NO: 8755 - RNA, 48 nt, synthetic construct
  source 1..48: mol_type = other RNA
aaaaaaaaaaaaaaaaaaaaaataaataaataaataaatataaatata

SEQ ID NO: 8756 - RNA, 48 nt, synthetic construct
  source 1..48: mol_type = other RNA
aaaaaaaaaaaaaaaaaaaaaataaataaataaatataaataaatata

SEQ ID NO: 8757 - RNA, 48 nt, synthetic construct
  source 1..48: mol_type = other RNA
aaataaaaaaaaaaaaaaaaaaaaaaaaaaaaaaaaaaaaaaaatata

SEQ ID NO: 8758 - RNA, 48 nt, synthetic construct
  source 1..48: mol_type = other RNA
aaaaaaaaaaaaaaaaaataaataaataaatataaataaataaatata

SEQ ID NO: 8759 - RNA, 48 nt, synthetic construct
  source 1..48: mol_type = other RNA
aaaaaaaaaaaaaaaaaataaataaatataaataaataaataaatata

SEQ ID NO: 8760 - RNA, 48 nt, synthetic construct
  source 1..48: mol_type = other RNA
aaaaaaaaaaaaaaaaaataaataaataaataaatataaataaatata

SEQ ID NO: 8761 - RNA, 48 nt, synthetic construct
  source 1..48: mol_type = other RNA
aaaaaaaaaaaaaaaaaataaataaataaataaataaatataaatata

SEQ ID NO: 8762 - RNA, 48 nt, synthetic construct
  source 1..48: mol_type = other RNA
aaataaaaaaaaaaaaaaaaaaaaaaaaaaaaaaaaaaaataaatata

SEQ ID NO: 8763 - RNA, 48 nt, synthetic construct
  source 1..48: mol_type = other RNA
aaataaataaaaaaaaaaaaaaaaaaaaaaaaaaaaaaaaaaaatata

SEQ ID NO: 8764 - RNA, 48 nt, synthetic construct
  source 1..48: mol_type = other RNA
aaaaaaaaaaaaaataaataaataaataaatataaataaataaatata

SEQ ID NO: 8765 - RNA, 48 nt, synthetic construct
  source 1..48: mol_type = other RNA
aaaaaaaaaaaaaataaataaataaataaataaataaatataaatata

SEQ ID NO: 8766 - RNA, 48 nt, synthetic construct
  source 1..48: mol_type = other RNA
aaaaaaaaaaaaaataaataaataaataaataaatataaataaatata

SEQ ID NO: 8767 - RNA, 48 nt, synthetic construct
  source 1..48: mol_type = other RNA
aaaaaaaaaaaaaataaataaataaatataaataaataaataaatata

SEQ ID NO: 8768 - RNA, 48 nt, synthetic construct
  source 1..48: mol_type = other RNA
aaataaataaaaaaaaaaaaaaaaaaaaaaaaaaaaaaaataaatata

SEQ ID NO: 8769 - RNA, 48 nt, synthetic construct
  source 1..48: mol_type = other RNA
aaataaaaaaaaaaaaaaaaaaaaaaaaaaaaaaaataaataaatata

SEQ ID NO: 8770 - RNA, 48 nt, synthetic construct
  source 1..48: mol_type = other RNA
aaataaataaataaaaaaaaaaaaaaaaaaaaaaaaaaaaaaaatata

SEQ ID NO: 8771 - RNA, 48 nt, synthetic construct
  source 1..48: mol_type = other RNA
aaaaaaaaaataaataaataaataaataaatataaataaataaatata

SEQ ID NO: 8772 - RNA, 48 nt, synthetic construct
  source 1..48: mol_type = other RNA
aaaaaaaaaataaataaataaataaataaataaatataaataaatata

SEQ ID NO: 8773 - RNA, 48 nt, synthetic construct
  source 1..48: mol_type = other RNA
aaaaaaaaaataaataaataaataaataaataaataaatataaatata

SEQ ID NO: 8774 - RNA, 48 nt, synthetic construct
  source 1..48: mol_type = other RNA
aaaaaaaaaataaataaataaataaatataaataaataaataaatata

SEQ ID NO: 8775 - RNA, 48 nt, synthetic construct
  source 1..48: mol_type = other RNA
aaaaaaaaaataaataaatataaataaataaataaataaataaatata

SEQ ID NO: 8776 - RNA, 48 nt, synthetic construct
  source 1..48: mol_type = other RNA
aaataaataaaaaaaaaaaaaaaaaaaaaaaaaaaataaataaatata

SEQ ID NO: 8777 - RNA, 48 nt, synthetic construct
  source 1..48: mol_type = other RNA
aaataaaaaaaaaaaaaaaaaaaaaaaaaaaataaataaataaatata

SEQ ID NO: 8778 - RNA, 48 nt, synthetic construct
  source 1..48: mol_type = other RNA
aaataaataaataaataaaaaaaaaaaaaaaaaaaaaaaaaaaatata

SEQ ID NO: 8779 - RNA, 48 nt, synthetic construct
  source 1..48: mol_type = other RNA
aaataaataaataaaaaaaaaaaaaaaaaaaaaaaaaaaataaatata

SEQ ID NO: 8780 - RNA, 48 nt, synthetic construct
  source 1..48: mol_type = other RNA
aaaaaaaaaaaaaaaaaaaaaaaaaaaaaaaaaaaaaaaaaatatata

SEQ ID NO: 8781 - RNA, 48 nt, synthetic construct
  source 1..48: mol_type = other RNA
aaaaaataaataaataaataaataaataaatataaataaataaatata

SEQ ID NO: 8782 - RNA, 48 nt, synthetic construct
  source 1..48: mol_type = other RNA
aaaaaataaataaataaataaataaatataaataaataaataaatata

SEQ ID NO: 8783 - RNA, 48 nt, synthetic construct
  source 1..48: mol_type = other RNA
aaataaataaaaaaaaaaaaaaaaaaaaaaaataaataaataaatata

SEQ ID NO: 8784 - RNA, 48 nt, synthetic construct
  source 1..48: mol_type = other RNA
aaataaataaataaataaataaaaaaaaaaaaaaaaaaaaaaaatata

SEQ ID NO: 8785 - RNA, 48 nt, synthetic construct
  source 1..48: mol_type = other RNA
aaataaataaataaataaaaaaaaaaaaaaaaaaaaaaaataaatata

SEQ ID NO: 8786 - RNA, 48 nt, synthetic construct
  source 1..48: mol_type = other RNA
aaataaaaaaaaaaaaaaaaaaaaaaaataaataaataaataaatata

SEQ ID NO: 8787 - RNA, 48 nt, synthetic construct
  source 1..48: mol_type = other RNA
aaaaaaaaaaaaaaaaaaaaaaaaaaaaaaaaaaaaaataaatatata

SEQ ID NO: 8788 - RNA, 48 nt, synthetic construct
  source 1..48: mol_type = other RNA
aaaaaaaaaaaaaaaaaaaaaaaaaaaaaaaaaaaaaaaaaaaaataa

SEQ ID NO: 8789 - RNA, 48 nt, synthetic construct
  source 1..48: mol_type = other RNA
aaataaataaataaataaataaaaaaaaaaaaaaaaaaaataaatata

SEQ ID NO: 8790 - RNA, 48 nt, synthetic construct
  source 1..48: mol_type = other RNA
aaataaataaataaataaataaataaaaaaaaaaaaaaaaaaaatata

SEQ ID NO: 8791 - RNA, 48 nt, synthetic construct
  source 1..48: mol_type = other RNA
aaaaaaaaaaaaaaaaaaaaaaaaaaaaaaaaaataaataaatatata

SEQ ID NO: 8792 - RNA, 48 nt, synthetic construct
  source 1..48: mol_type = other RNA
aaaaaaaaaaaaaaaaaaaaaaaaaaaaaaaaaaaaaaaaataaataa

SEQ ID NO: 8793 - RNA, 48 nt, synthetic construct
  source 1..48: mol_type = other RNA
aaataaataaataaataaataaataaaaaaaaaaaaaaaataaatata

SEQ ID NO: 8794 - RNA, 48 nt, synthetic construct
  source 1..48: mol_type = other RNA
aaataaataaataaataaataaaaaaaaaaaaaaaataaataaatata

SEQ ID NO: 8795 - RNA, 48 nt, synthetic construct
  source 1..48: mol_type = other RNA
aaataaataaataaataaataaataaataaaaaaaaaaaaaaaatata

SEQ ID NO: 8796 - RNA, 48 nt, synthetic construct
  source 1..48: mol_type = other RNA
aaaaaaaaaaaaaaaaaaaaaaaaaaaaaaaaaaaaataaataaataa

SEQ ID NO: 8797 - RNA, 48 nt, synthetic construct
  source 1..48: mol_type = other RNA
aaaaaaaaaaaaaaaaaaaaaaaaaataaataaataaataaatatata

SEQ ID NO: 8798 - RNA, 48 nt, synthetic construct
  source 1..48: mol_type = other RNA
aaataaataaataaataaataaataaaaaaaaaaaataaataaatata

SEQ ID NO: 8799 - RNA, 48 nt, synthetic construct
  source 1..48: mol_type = other RNA
aaataaataaataaataaataaataaataaaaaaaaaaaataaatata

SEQ ID NO: 8800 - RNA, 48 nt, synthetic construct
  source 1..48: mol_type = other RNA
aaaaaaaaaaaaaaaaaaaaaaaaaaaaaaaaaaaaaaaaaaaataaa

SEQ ID NO: 8801 - RNA, 48 nt, synthetic construct
  source 1..48: mol_type = other RNA
aaaaaaaaaaaaaaaaaaaaaaaaaaaaaaaaataaataaataaataa

SEQ ID NO: 8802 - RNA, 48 nt, synthetic construct
  source 1..48: mol_type = other RNA
aaataaaaaaaataaataaataaataaataaataaataaataaatata

SEQ ID NO: 8803 - RNA, 48 nt, synthetic construct
  source 1..48: mol_type = other RNA
aaaaaaaaaaaaaaaaaaaaaataaataaataaataaataaatatata

SEQ ID NO: 8804 - RNA, 48 nt, synthetic construct
  source 1..48: mol_type = other RNA
aaaaaaaaaaaaaaaaaaaaaaaaaaaaaaaaaaaaaaaataaataaa

SEQ ID NO: 8805 - RNA, 48 nt, synthetic construct
  source 1..48: mol_type = other RNA
aaaaaaaaaaaaaaaaaaaaaaaaaaaaataaataaataaataaataa

SEQ ID NO: 8806 - RNA, 48 nt, synthetic construct
  source 1..48: mol_type = other RNA
aaaaaaaaaaaaaaaaaataaataaataaataaataaataaatatata

SEQ ID NO: 8807 - RNA, 48 nt, synthetic construct
  source 1..48: mol_type = other RNA
aaaaaaaaaaaaaaaaaaaaaaaaaaaaaaaaaaaataaataaataaa

SEQ ID NO: 8808 - RNA, 48 nt, synthetic construct
  source 1..48: mol_type = other RNA
aaaaaaaaaaaaaaaaaaaaaaaaataaataaataaataaataaataa

SEQ ID NO: 8809 - RNA, 48 nt, synthetic construct
  source 1..48: mol_type = other RNA
aaaaaaaaaaaaaataaataaataaataaataaataaataaatatata

SEQ ID NO: 8810 - RNA, 48 nt, synthetic construct
  source 1..48: mol_type = other RNA
aaaaaaaaaaaaaaaaaaaaaaaaaaaaaaaataaataaataaataaa

SEQ ID NO: 8811 - RNA, 48 nt, synthetic construct
  source 1..48: mol_type = other RNA
aaaaaaaaaaaaaaaaaaaaataaataaataaataaataaataaataa

SEQ ID NO: 8812 - RNA, 48 nt, synthetic construct
  source 1..48: mol_type = other RNA
aaaaaaaaaataaataaataaataaataaataaataaataaatatata

SEQ ID NO: 8813 - RNA, 48 nt, synthetic construct
  source 1..48: mol_type = other RNA
aaaaaaaaaaaaaaaaaaaaaaaaaaaataaataaataaataaataaa

SEQ ID NO: 8814 - RNA, 48 nt, synthetic construct
  source 1..48: mol_type = other RNA
aaaaaaaaaaaaaaaaataaataaataaataaataaataaataaataa

SEQ ID NO: 8815 - RNA, 48 nt, synthetic construct
  source 1..48: mol_type = other RNA
aaaaaaaaaaaaaaaaaaaaaaaaaaaaaaaaaaaaaaaaaaaaatat

SEQ ID NO: 8816 - RNA, 48 nt, synthetic construct
  source 1..48: mol_type = other RNA
aaaaaaaaaaaaaaaaaaaaaaaaaaaaaaaaaaaaaaaaataaatat

SEQ ID NO: 8817 - RNA, 48 nt, synthetic construct
  source 1..48: mol_type = other RNA
aaaaaaaaaaaaaaaaaaaaaaaaaaaaaaaaaaaaataaataaatat

SEQ ID NO: 8818 - RNA, 48 nt, synthetic construct
  source 1..48: mol_type = other RNA
aaaaaaaaaaaaaaaaaaaaaaaaaaaaaaaaataaataaataaatat

SEQ ID NO: 8819 - RNA, 48 nt, synthetic construct
  source 1..48: mol_type = other RNA
aaaaaaaaaaaaaaaaaaaaaaaaaaaaataaataaataaataaatat

SEQ ID NO: 8820 - RNA, 48 nt, synthetic construct
  source 1..48: mol_type = other RNA
aaaaaaaaaaaaaaaaaaaaaaaaaaaaaaaaaaaaaaaaaaaaaata

SEQ ID NO: 8821 - RNA, 48 nt, synthetic construct
  source 1..48: mol_type = other RNA
aaaaaaaaaaaaaaaaaaaaaaaaaaaaaaaaaaaaaaaaaataaata

SEQ ID NO: 8822 - RNA, 48 nt, synthetic construct
  source 1..48: mol_type = other RNA
aaaaaaaaaaaaaaaaaaaaaaaaaaaaaaaatataaatataaatata

SEQ ID NO: 8823 - RNA, 48 nt, synthetic construct
  source 1..48: mol_type = other RNA
aaaaaaaaaaaaaaaaaaaaaaaaaaaaaaaaaaaaaataaataaata

SEQ ID NO: 8824 - RNA, 48 nt, synthetic construct
  source 1..48: mol_type = other RNA
aaaaaaaaaaaaaaaaaaaaaaaaaaaatataaatataaataaatata

SEQ ID NO: 8825 - RNA, 48 nt, synthetic construct
  source 1..48: mol_type = other RNA
aaaaaaaaaaaaaaaaaaaaaaaaaaaataaatataaatataaatata

SEQ ID NO: 8826 - RNA, 48 nt, synthetic construct
  source 1..48: mol_type = other RNA
aaaaaaaaaaaaaaaaaaaaaaaaaaaatataaataaatataaatata

SEQ ID NO: 8827 - RNA, 48 nt, synthetic construct
  source 1..48: mol_type = other RNA
aaaaaaaaaaaaaaaaaaaaaaaaaaaaaaaaaataaataaataaata

SEQ ID NO: 8828 - RNA, 48 nt, synthetic construct
  source 1..48: mol_type = other RNA
aaaaaaaaaaaaaaaaaaaaaaaataaatataaatataaataaatata

SEQ ID NO: 8829 - RNA, 48 nt, synthetic construct
  source 1..48: mol_type = other RNA
aaaaaaaaaaaaaaaaaaaaaaaatataaataaataaatataaatata

SEQ ID NO: 8830 - RNA, 48 nt, synthetic construct
  source 1..48: mol_type = other RNA
aaaaaaaaaaaaaaaaaaaaaaaatataaataaatataaataaatata

SEQ ID NO: 8831 - RNA, 48 nt, synthetic construct
  source 1..48: mol_type = other RNA
aaaaaaaaaaaaaaaaaaaaaaaatataaatataaataaataaatata

SEQ ID NO: 8832 - RNA, 48 nt, synthetic construct
  source 1..48: mol_type = other RNA
aaaaaaaaaaaaaaaaaaaataaatataaatataaataaataaatata

SEQ ID NO: 8833 - RNA, 48 nt, synthetic construct
  source 1..48: mol_type = other RNA
aaaaaaaaaaaaaaaaaaaataaatataaataaatataaataaatata

SEQ ID NO: 8834 - RNA, 48 nt, synthetic construct
  source 1..48: mol_type = other RNA
aaaaaaaaaaaaaaaaaaaatataaataaataaataaatataaatata

SEQ ID NO: 8835 - RNA, 48 nt, synthetic construct
  source 1..48: mol_type = other RNA
aaaaaaaaaaaaaaaaaaaataaatataaataaataaatataaatata

SEQ ID NO: 8836 - RNA, 48 nt, synthetic construct
  source 1..48: mol_type = other RNA
aaaaaaaaaaaaaaaaaaaatataaataaataaatataaataaatata

SEQ ID NO: 8837 - RNA, 48 nt, synthetic construct
  source 1..48: mol_type = other RNA
aaaaaaaaaaaaaaaaaaaataaataaatataaataaatataaatata

SEQ ID NO: 8838 - RNA, 49 nt, synthetic construct
  source 1..49: mol_type = other RNA
aaataaataaataaataaataaataaataaataaatataaataaatata

SEQ ID NO: 8839 - RNA, 49 nt, synthetic construct
  source 1..49: mol_type = other RNA
aaataaataaataaataaataaataaataaataaataaatataaatata

SEQ ID NO: 8840 - RNA, 49 nt, synthetic construct
  source 1..49: mol_type = other RNA
aaataaataaataaataaataaataaataaatataaataaataaatata

SEQ ID NO: 8841 - RNA, 49 nt, synthetic construct
  source 1..49: mol_type = other RNA
aaataaataaatataaataaataaataaataaataaataaataaatata

SEQ ID NO: 8842 - RNA, 49 nt, synthetic construct
  source 1..49: mol_type = other RNA
aaaaaaaaaaaaaaaaaaaaaaaaaaaaaaaaaaaaaaaaaaaaatata

SEQ ID NO: 8843 - RNA, 49 nt, synthetic construct
  source 1..49: mol_type = other RNA
aaaaaaaaaaaaaaaaaaaaaaaaaaaaaaaaaaaaaaaaataaatata

SEQ ID NO: 8844 - RNA, 49 nt, synthetic construct
  source 1..49: mol_type = other RNA
aaaaaaaaaaaaaaaaaaaaaaaaaaaaataaataaataaataaatata

SEQ ID NO: 8845 - RNA, 49 nt, synthetic construct
  source 1..49: mol_type = other RNA
aaaaaaaaaaaaaaaaaaaaaaaaataaataaataaataaataaatata

SEQ ID NO: 8846 - RNA, 49 nt, synthetic construct
  source 1..49: mol_type = other RNA
aaaaaaaaaaaaaaaaaaaaataaataaataaataaataaataaatata

SEQ ID NO: 8847 - RNA, 49 nt, synthetic construct
  source 1..49: mol_type = other RNA
aaaaaaaaaaaaaaaaataaataaataaataaataaataaataaatata

SEQ ID NO: 8848 - RNA, 49 nt, synthetic construct
  source 1..49: mol_type = other RNA
aaaaaaaaaaaaataaataaataaataaataaataaataaataaatata

SEQ ID NO: 8849 - RNA, 49 nt, synthetic construct
  source 1..49: mol_type = other RNA
aaataaataaataaataaataaataaataaataaataaatataaataaa

SEQ ID NO: 8850 - RNA, 49 nt, synthetic construct
  source 1..49: mol_type = other RNA
aaataaataaataaataaataaataaataaataaatataaataaataaa

SEQ ID NO: 8851 - RNA, 49 nt, synthetic construct
  source 1..49: mol_type = other RNA
aaataaataaataaataaataaataaataaatataaataaataaataaa

SEQ ID NO: 8852 - RNA, 49 nt, synthetic construct
  source 1..49: mol_type = other RNA
aaaaaaaaaaaaaaaaaaaaaaaaaaaaaaaaaaaaaaatataaatata

SEQ ID NO: 8853 - RNA, 49 nt, synthetic construct
  source 1..49: mol_type = other RNA
aaaaaaaaaaaaaaaaaaaaaaaaaaaaaaaaaaataaatataaatata

SEQ ID NO: 8854 - RNA, 49 nt, synthetic construct
  source 1..49: mol_type = other RNA
aaataaaaaaaaaaaaaaaaaaaaaaaaaaaaaaaaaaaaaaaaatata

SEQ ID NO: 8855 - RNA, 49 nt, synthetic construct
  source 1..49: mol_type = other RNA
aaataaataaaaaaaaaaaaaaaaaaaaaaaaaaaaaaaaaaaaatata

SEQ ID NO: 8856 - RNA, 49 nt, synthetic construct
  source 1..49: mol_type = other RNA
aaataaaaaaaaaaaaaaaaaaaaaaaaaaaaaaaaaaaaataaatata

SEQ ID NO: 8857 - RNA, 49 nt, synthetic construct
  source 1..49: mol_type = other RNA
aaataaataaataaaaaaaaaaaaaaaaaaaaaaaaaaaaaaaaatata

SEQ ID NO: 8858 - RNA, 49 nt, synthetic construct
  source 1..49: mol_type = other RNA
aaataaataaaaaaaaaaaaaaaaaaaaaaaaaaaaaaaaataaatata

SEQ ID NO: 8859 - RNA, 49 nt, synthetic construct
  source 1..49: mol_type = other RNA
aaataaaaaaaaaaaaaaaaaaaaaaaaaaaaaaaaataaataaatata

SEQ ID NO: 8860 - RNA, 49 nt, synthetic construct
  source 1..49: mol_type = other RNA
aaaaaaaaaaatataaataaataaataaataaataaataaataaatata

SEQ ID NO: 8861 - RNA, 49 nt, synthetic construct
  source 1..49: mol_type = other RNA
aaaaaaaaaaaaaaaaaaaaaaaaaaaaaaaaaaaaaaaaaaatatata

SEQ ID NO: 8862 - RNA, 49 nt, synthetic construct
  source 1..49: mol_type = other RNA
aaataaataaataaataaaaaaaaaaaaaaaaaaaaaaaaaaaaatata

SEQ ID NO: 8863 - RNA, 49 nt, synthetic construct
  source 1..49: mol_type = other RNA
aaataaataaaaaaaaaaaaaaaaaaaaaaaaaaaaataaataaatata

SEQ ID NO: 8864 - RNA, 49 nt, synthetic construct
  source 1..49: mol_type = other RNA
aaataaataaataaaaaaaaaaaaaaaaaaaaaaaaaaaaataaatata

SEQ ID NO: 8865 - RNA, 49 nt, synthetic construct
  source 1..49: mol_type = other RNA
aaaaaaataaatataaataaataaataaataaataaataaataaatata

SEQ ID NO: 8866 - RNA, 49 nt, synthetic construct
  source 1..49: mol_type = other RNA
aaataaaaaaaaaaaaaaaaaaaaaaaaataaataaataaataaatata

SEQ ID NO: 8867 - RNA, 49 nt, synthetic construct
  source 1..49: mol_type = other RNA
aaataaataaataaataaataaaaaaaaaaaaaaaaaaaaaaaaatata

SEQ ID NO: 8868 - RNA, 49 nt, synthetic construct
  source 1..49: mol_type = other RNA
aaataaataaataaataaaaaaaaaaaaaaaaaaaaaaaaataaatata

SEQ ID NO: 8869 - RNA, 49 nt, synthetic construct
  source 1..49: mol_type = other RNA
aaataaataaataaaaaaaaaaaaaaaaaaaaaaaaataaataaatata

SEQ ID NO: 8870 - RNA, 49 nt, synthetic construct
  source 1..49: mol_type = other RNA
aaaaaaaaaaaaaaaaaaaaaaaaaaaaaaaaaaaaaaataaatatata

SEQ ID NO: 8871 - RNA, 49 nt, synthetic construct
  source 1..49: mol_type = other RNA
aaaaaaaaaaaaaaaaaaaaaaaaaaaaaaaaaaaaaaaaaaaaaataa

SEQ ID NO: 8872 - RNA, 49 nt, synthetic construct
  source 1..49: mol_type = other RNA
aaataaataaaaaaaaaaaaaaaaaaaaataaataaataaataaatata

SEQ ID NO: 8873 - RNA, 49 nt, synthetic construct
  source 1..49: mol_type = other RNA
aaataaaaaaaaaaaaaaaaaaaaataaataaataaataaataaatata

SEQ ID NO: 8874 - RNA, 49 nt, synthetic construct
  source 1..49: mol_type = other RNA
aaataaataaataaataaataaaaaaaaaaaaaaaaaaaaataaatata

SEQ ID NO: 8875 - RNA, 49 nt, synthetic construct
  source 1..49: mol_type = other RNA
aaataaataaataaataaataaataaaaaaaaaaaaaaaaaaaaatata

SEQ ID NO: 8876 - RNA, 49 nt, synthetic construct
  source 1..49: mol_type = other RNA
aaataaataaataaataaaaaaaaaaaaaaaaaaaaataaataaatata

SEQ ID NO: 8877 - RNA, 49 nt, synthetic construct
  source 1..49: mol_type = other RNA
aaaaaaaaaaaaaaaaaaaaaaaaaaaaaaaaaaataaataaatatata

SEQ ID NO: 8878 - RNA, 49 nt, synthetic construct
  source 1..49: mol_type = other RNA
aaaaaaaaaaaaaaaaaaaaaaaaaaaaaaaaaaaaaaaaaataaataa

SEQ ID NO: 8879 - RNA, 49 nt, synthetic construct
  source 1..49: mol_type = other RNA
aaataaataaataaataaataaataaataaaaaaaaaaaaaaaaatata

SEQ ID NO: 8880 - RNA, 49 nt, synthetic construct
  source 1..49: mol_type = other RNA
aaataaataaataaataaataaaaaaaaaaaaaaaaataaataaatata

SEQ ID NO: 8881 - RNA, 49 nt, synthetic construct
  source 1..49: mol_type = other RNA
aaataaataaataaaaaaaaaaaaaaaaataaataaataaataaatata

SEQ ID NO: 8882 - RNA, 49 nt, synthetic construct
  source 1..49: mol_type = other RNA
aaataaaaaaaaaaaaaaaaataaataaataaataaataaataaatata

SEQ ID NO: 8883 - RNA, 49 nt, synthetic construct
  source 1..49: mol_type = other RNA
aaataaataaaaaaaaaaaaaaaaataaataaataaataaataaatata

SEQ ID NO: 8884 - RNA, 49 nt, synthetic construct
  source 1..49: mol_type = other RNA
aaataaataaataaataaataaataaaaaaaaaaaaaaaaataaatata

SEQ ID NO: 8885 - RNA, 49 nt, synthetic construct
  source 1..49: mol_type = other RNA
aaaaaaaaaaaaaaaaaaaaaaaaaaaaaaataaataaataaatatata

SEQ ID NO: 8886 - RNA, 49 nt, synthetic construct
  source 1..49: mol_type = other RNA
aaaaaaaaaaaaaaaaaaaaaaaaaaaaaaaaaaaaaataaataaataa

SEQ ID NO: 8887 - RNA, 49 nt, synthetic construct
  source 1..49: mol_type = other RNA
aaataaataaataaataaataaataaataaataaaaaaaaaaaaatata

SEQ ID NO: 8888 - RNA, 49 nt, synthetic construct
  source 1..49: mol_type = other RNA
aaataaataaataaataaataaataaataaaaaaaaaaaaataaatata

SEQ ID NO: 8889 - RNA, 49 nt, synthetic construct
  source 1..49: mol_type = other RNA
aaataaaaaaaaaaaaataaataaataaataaataaataaataaatata

SEQ ID NO: 8890 - RNA, 49 nt, synthetic construct
  source 1..49: mol_type = other RNA
aaataaataaataaaaaaaaaaaaataaataaataaataaataaatata

SEQ ID NO: 8891 - RNA, 49 nt, synthetic construct
  source 1..49: mol_type = other RNA
aaataaataaaaaaaaaaaaataaataaataaataaataaataaatata

SEQ ID NO: 8892 - RNA, 49 nt, synthetic construct
  source 1..49: mol_type = other RNA
aaataaataaataaataaataaataaaaaaaaaaaaataaataaatata

SEQ ID NO: 8893 - RNA, 49 nt, synthetic construct
  source 1..49: mol_type = other RNA
aaaaaaaaaaaaaaaaaaaaaaaaaaaaaaaaaaaaaaaaaaaaataaa

SEQ ID NO: 8894 - RNA, 49 nt, synthetic construct
  source 1..49: mol_type = other RNA
aaaaaaaaaaaaaaaaaaaaaaaaaaaaaaaaaataaataaataaataa

SEQ ID NO: 8895 - RNA, 49 nt, synthetic construct
  source 1..49: mol_type = other RNA
aaataaataaataaataaataaataaataaataaataaaaaaaaatata

SEQ ID NO: 8896 - RNA, 49 nt, synthetic construct
  source 1..49: mol_type = other RNA
aaataaataaataaataaataaataaataaaaaaaaataaataaatata

SEQ ID NO: 8897 - RNA, 49 nt, synthetic construct
  source 1..49: mol_type = other RNA
aaataaataaataaataaataaataaataaataaaaaaaaataaatata

SEQ ID NO: 8898 - RNA, 49 nt, synthetic construct
  source 1..49: mol_type = other RNA
aaataaataaataaaaaaaaataaataaataaataaataaataaatata

SEQ ID NO: 8899 - RNA, 49 nt, synthetic construct
  source 1..49: mol_type = other RNA
aaataaataaaaaaaaataaataaataaataaataaataaataaatata

SEQ ID NO: 8900 - RNA, 49 nt, synthetic construct
  source 1..49: mol_type = other RNA
aaataaaaaaaaataaataaataaataaataaataaataaataaatata

SEQ ID NO: 8901 - RNA, 49 nt, synthetic construct
  source 1..49: mol_type = other RNA
aaaaaaaaaaaaaaaaaaaaaaaaaaaaaaaaaaaaaaaaataaataaa

SEQ ID NO: 8902 - RNA, 49 nt, synthetic construct
  source 1..49: mol_type = other RNA
aaaaaaaaaaaaaaaaaaaaaaaaaaaaaataaataaataaataaataa

SEQ ID NO: 8903 - RNA, 49 nt, synthetic construct
  source 1..49: mol_type = other RNA
aaataaataaataaataaataaataaataaataaataaaaataaatata

SEQ ID NO: 8904 - RNA, 49 nt, synthetic construct
  source 1..49: mol_type = other RNA
aaataaataaataaataaataaataaataaataaaaataaataaatata

SEQ ID NO: 8905 - RNA, 49 nt, synthetic construct
  source 1..49: mol_type = other RNA
aaataaataaataaataaataaataaataaataaataaataaaaatata

SEQ ID NO: 8906 - RNA, 49 nt, synthetic construct
  source 1..49: mol_type = other RNA
aaataaataaataaaaataaataaataaataaataaataaataaatata

SEQ ID NO: 8907 - RNA, 49 nt, synthetic construct
  source 1..49: mol_type = other RNA
aaataaataaaaataaataaataaataaataaataaataaataaatata

SEQ ID NO: 8908 - RNA, 49 nt, synthetic construct
  source 1..49: mol_type = other RNA
aaaaaaaaaaaaaaaaaaaaaaaaaaaaaaaaaaaaataaataaataaa

SEQ ID NO: 8909 - RNA, 49 nt, synthetic construct
  source 1..49: mol_type = other RNA
aaaaaaaaaaaaaaaaaaaaaaaaaataaataaataaataaataaataa

SEQ ID NO: 8910 - RNA, 49 nt, synthetic construct
  source 1..49: mol_type = other RNA
aaaaaaaaaaaaaaaaaaaaaataaataaataaataaataaataaataa

SEQ ID NO: 8911 - RNA, 49 nt, synthetic construct
  source 1..49: mol_type = other RNA
aaaaaaaaaaaaaaaaaataaataaataaataaataaataaataaataa

SEQ ID NO: 8912 - RNA, 49 nt, synthetic construct
  source 1..49: mol_type = other RNA
aaaaaaaaaaaaaaaaaaaaaaaaataaataaataaataaataaataaa

SEQ ID NO: 8913 - RNA, 49 nt, synthetic construct
  source 1..49: mol_type = other RNA
aaaaaaaaaaaaaataaataaataaataaataaataaataaataaataa

SEQ ID NO: 8914 - RNA, 49 nt, synthetic construct
  source 1..49: mol_type = other RNA
aaaaaaaaaataaataaataaataaataaataaataaataaataaataa

SEQ ID NO: 8915 - RNA, 49 nt, synthetic construct
  source 1..49: mol_type = other RNA
aaaaaaaaaaaaaaaaaaaaaaaaaaaaaaaaaaaaaaaaaaaaaatat

SEQ ID NO: 8916 - RNA, 49 nt, synthetic construct
  source 1..49: mol_type = other RNA
aaaaaataaataaataaataaataaataaataaataaataaataaataa

SEQ ID NO: 8917 - RNA, 49 nt, synthetic construct
  source 1..49: mol_type = other RNA
aaaaaaaaaaaaaaaaaaaaaaaaaaaaaaaaaaaaaaaaaataaatat

SEQ ID NO: 8918 - RNA, 49 nt, synthetic construct
  source 1..49: mol_type = other RNA
aaataaataaatataaataaataaataaataaatataaatataaatata

SEQ ID NO: 8919 - RNA, 49 nt, synthetic construct
  source 1..49: mol_type = other RNA
aaaaaaaaaaaaaaaaaaaaaaaaaaaaaaaaaaaaaataaataaatat

SEQ ID NO: 8920 - RNA, 49 nt, synthetic construct
  source 1..49: mol_type = other RNA
aaaaaaaaaaaaaaaaaaaaaaaaaaaaaaaaaataaataaataaatat

SEQ ID NO: 8921 - RNA, 49 nt, synthetic construct
  source 1..49: mol_type = other RNA
aaaaaaaaaaaaaaaaaaaaaaaaaaaaaataaataaataaataaatat

SEQ ID NO: 8922 - RNA, 49 nt, synthetic construct
  source 1..49: mol_type = other RNA
aaaaaaaaaaaaaaaaaaaaaaaaaataaataaataaataaataaatat

SEQ ID NO: 8923 - RNA, 49 nt, synthetic construct
  source 1..49: mol_type = other RNA
aaaaaaaaaaaaaaaaaaaaaataaataaataaataaataaataaatat

SEQ ID NO: 8924 - RNA, 49 nt, synthetic construct
  source 1..49: mol_type = other RNA
aaaaaaaaaaaaaaaaaataaataaataaataaataaataaataaatat

SEQ ID NO: 8925 - RNA, 49 nt, synthetic construct
  source 1..49: mol_type = other RNA
aaaaaaaaaaaaaataaataaataaataaataaataaataaataaatat

SEQ ID NO: 8926 - RNA, 49 nt, synthetic construct
  source 1..49: mol_type = other RNA
aaaaaaaaaataaataaataaataaataaataaataaataaataaatat

SEQ ID NO: 8927 - RNA, 49 nt, synthetic construct
  source 1..49: mol_type = other RNA
aaaaaataaataaataaataaataaataaataaataaataaataaatat

SEQ ID NO: 8928 - RNA, 49 nt, synthetic construct
  source 1..49: mol_type = other RNA
aaataaataaataaataaataaataaatatataaatataaataaatata

SEQ ID NO: 8929 - RNA, 49 nt, synthetic construct
  source 1..49: mol_type = other RNA
aaataaataaataaataaatatataaataaataaatataaataaatata

SEQ ID NO: 8930 - RNA, 49 nt, synthetic construct
  source 1..49: mol_type = other RNA
aaatatataaataaataaataaataaataaataaataaatataaatata

SEQ ID NO: 8931 - RNA, 49 nt, synthetic construct
  source 1..49: mol_type = other RNA
aaatatataaataaataaataaataaataaataaatataaataaatata

SEQ ID NO: 8932 - RNA, 49 nt, synthetic construct
  source 1..49: mol_type = other RNA
aaataaataaataaataaatatataaataaataaataaatataaatata

SEQ ID NO: 8933 - RNA, 49 nt, synthetic construct
  source 1..49: mol_type = other RNA
aaataaataaataaataaataaataaataaatatataaatataaatata

SEQ ID NO: 8934 - RNA, 49 nt, synthetic construct
  source 1..49: mol_type = other RNA
aaataaataaataaataaataaataaataaatataaatatataaatata

SEQ ID NO: 8935 - RNA, 49 nt, synthetic construct
  source 1..49: mol_type = other RNA
aaataaataaatataaataaataaataaataaatataaataaatatata

SEQ ID NO: 8936 - RNA, 49 nt, synthetic construct
  source 1..49: mol_type = other RNA
aaataaataaatataaataaataaataaataaataaatataaatatata

SEQ ID NO: 8937 - RNA, 49 nt, synthetic construct
  source 1..49: mol_type = other RNA
aaataaataaatataaataaataaataaataaataaatatataaatata

SEQ ID NO: 8938 - RNA, 49 nt, synthetic construct
  source 1..49: mol_type = other RNA
aaataaatataaataaataaataaataaataaataaatataaatatata

SEQ ID NO: 8939 - RNA, 49 nt, synthetic construct
  source 1..49: mol_type = other RNA
aaataaataaatataaataaataaataaataaatatataaataaatata

SEQ ID NO: 8940 - RNA, 50 nt, synthetic construct
  source 1..50: mol_type = other RNA
aaaaaaaaaaaaaaaaaaaaaaaaaaaaaaaaaaaaaaaaaaaaaatata

SEQ ID NO: 8941 - RNA, 50 nt, synthetic construct
  source 1..50: mol_type = other RNA
aaaaaaaaaaaaaaaaaaaaaaaaaaaaaaaaaaaaaaaaaataaatata

SEQ ID NO: 8942 - RNA, 50 nt, synthetic construct
  source 1..50: mol_type = other RNA
aaaaaaaaaaaaaaaaaaaaaaaaaaaaaaaaaaaaaataaataaatata

SEQ ID NO: 8943 - RNA, 50 nt, synthetic construct
  source 1..50: mol_type = other RNA
aaaaaaaaaaaaaaaaaaaaaaaaaaaaaaaaaataaataaataaatata

SEQ ID NO: 8944 - RNA, 50 nt, synthetic construct
  source 1..50: mol_type = other RNA
aaaaaaaaaaaaaaaaaaaaaaaaaaaaaataaataaataaataaatata

SEQ ID NO: 8945 - RNA, 50 nt, synthetic construct
  source 1..50: mol_type = other RNA
aaaaaaaaaaaaaaaaaaaaaaaaaataaataaataaataaataaatata

SEQ ID NO: 8946 - RNA, 50 nt, synthetic construct
  source 1..50: mol_type = other RNA
aaaaaaaaaaaaaaaaaaaaaataaataaataaataaataaataaatata

SEQ ID NO: 8947 - RNA, 50 nt, synthetic construct
  source 1..50: mol_type = other RNA
aaaaaaaaaaaaaaaaaataaataaataaataaataaataaataaatata

SEQ ID NO: 8948 - RNA, 50 nt, synthetic construct
  source 1..50: mol_type = other RNA
aaaaaaaaaaaaaaaaaaaaaaaaaaaaaaaaaaaaaaaatataaatata

SEQ ID NO: 8949 - RNA, 50 nt, synthetic construct
  source 1..50: mol_type = other RNA
aaaaaaaaaaaaaaaaaaaaaaaaaaaaaaaaaaaataaatataaatata

SEQ ID NO: 8950 - RNA, 50 nt, synthetic construct
  source 1..50: mol_type = other RNA
aaaaaaaaaaaaaaaaaaaaaaaaaaaaaaaaaaaatataaataaatata

SEQ ID NO: 8951 - RNA, 50 nt, synthetic construct
  source 1..50: mol_type = other RNA
aaaaaaaaaaaaaaaaaaaaaaaaaaaaaaaatataaataaataaatata

SEQ ID NO: 8952 - RNA, 50 nt, synthetic construct
  source 1..50: mol_type = other RNA
aaaaaaaaaaaaaaaaaaaaaaaaaaaaaaaataaataaatataaatata

SEQ ID NO: 8953 - RNA, 50 nt, synthetic construct
  source 1..50: mol_type = other RNA
aaaaaaaaaaaaaaaaaaaaaaaaaaaatataaataaataaataaatata

SEQ ID NO: 8954 - RNA, 50 nt, synthetic construct
  source 1..50: mol_type = other RNA
aaaaaaaaaaaaaaaaaaaaaaaaaaaataaataaataaatataaatata

SEQ ID NO: 8955 - RNA, 50 nt, synthetic construct
  source 1..50: mol_type = other RNA
aaaaaaaaaaaaaaaaaaaaaaaataaataaataaataaatataaatata

SEQ ID NO: 8956 - RNA, 50 nt, synthetic construct
  source 1..50: mol_type = other RNA
aaaaaaaaaaaaaaaaaaaaaaaataaataaataaatataaataaatata

SEQ ID NO: 8957 - RNA, 50 nt, synthetic construct
  source 1..50: mol_type = other RNA
aaaaaaaaaaaaaaaaaaaaaaaataaataaatataaataaataaatata

SEQ ID NO: 8958 - RNA, 50 nt, synthetic construct
  source 1..50: mol_type = other RNA
aaataaaaaaaaaaaaaaaaaaaaaaaaaaaaaaaaaaaaaaaaaatata

SEQ ID NO: 8959 - RNA, 50 nt, synthetic construct
  source 1..50: mol_type = other RNA
aaaaaaaaaaaaaaaaaaaatataaataaataaataaataaataaatata

SEQ ID NO: 8960 - RNA, 50 nt, synthetic construct
  source 1..50: mol_type = other RNA
aaaaaaaaaaaaaaaaaaaataaataaataaataaataaatataaatata

SEQ ID NO: 8961 - RNA, 50 nt, synthetic construct
  source 1..50: mol_type = other RNA
aaaaaaaaaaaaaaaaaaaataaataaataaatataaataaataaatata

SEQ ID NO: 8962 - RNA, 50 nt, synthetic construct
  source 1..50: mol_type = other RNA
aaaaaaaaaaaaaaaaaaaataaataaataaataaatataaataaatata

SEQ ID NO: 8963 - RNA, 50 nt, synthetic construct
  source 1..50: mol_type = other RNA
aaataaataaaaaaaaaaaaaaaaaaaaaaaaaaaaaaaaaaaaaatata

SEQ ID NO: 8964 - RNA, 50 nt, synthetic construct
  source 1..50: mol_type = other RNA
aaataaaaaaaaaaaaaaaaaaaaaaaaaaaaaaaaaaaaaataaatata

SEQ ID NO: 8965 - RNA, 50 nt, synthetic construct
  source 1..50: mol_type = other RNA
aaaaaaaaaaaaaaaataaataaataaataaatataaataaataaatata

SEQ ID NO: 8966 - RNA, 50 nt, synthetic construct
  source 1..50: mol_type = other RNA
aaaaaaaaaaaaaaaataaataaataaataaataaatataaataaatata

SEQ ID NO: 8967 - RNA, 50 nt, synthetic construct
  source 1..50: mol_type = other RNA
aaataaaaaaaaaaaaaaaaaaaaaaaaaaaaaaaaaataaataaatata

SEQ ID NO: 8968 - RNA, 50 nt, synthetic construct
  source 1..50: mol_type = other RNA
aaataaataaataaaaaaaaaaaaaaaaaaaaaaaaaaaaaaaaaatata

SEQ ID NO: 8969 - RNA, 50 nt, synthetic construct
  source 1..50: mol_type = other RNA
aaataaataaaaaaaaaaaaaaaaaaaaaaaaaaaaaaaaaataaatata

SEQ ID NO: 8970 - RNA, 50 nt, synthetic construct
  source 1..50: mol_type = other RNA
aaaaaaaaaaaataaataaataaataaataaatataaataaataaatata

SEQ ID NO: 8971 - RNA, 50 nt, synthetic construct
  source 1..50: mol_type = other RNA
aaaaaaaaaaaataaataaataaataaataaataaatataaataaatata

SEQ ID NO: 8972 - RNA, 50 nt, synthetic construct
  source 1..50: mol_type = other RNA
aaataaataaaaaaaaaaaaaaaaaaaaaaaaaaaaaataaataaatata

SEQ ID NO: 8973 - RNA, 50 nt, synthetic construct
  source 1..50: mol_type = other RNA
aaataaataaataaaaaaaaaaaaaaaaaaaaaaaaaaaaaataaatata

SEQ ID NO: 8974 - RNA, 50 nt, synthetic construct
  source 1..50: mol_type = other RNA
aaataaataaataaataaaaaaaaaaaaaaaaaaaaaaaaaaaaaatata

SEQ ID NO: 8975 - RNA, 50 nt, synthetic construct
  source 1..50: mol_type = other RNA
aaaaaaaaaaaaaaaaaaaaaaaaaaaaaaaaaaaaaaaaaaaatatata

SEQ ID NO: 8976 - RNA, 50 nt, synthetic construct
  source 1..50: mol_type = other RNA
aaaaaaaataaataaataaataaataaataaatataaataaataaatata

SEQ ID NO: 8977 - RNA, 50 nt, synthetic construct
  source 1..50: mol_type = other RNA
aaaaaaaataaataaataaataaataaataaataaatataaataaatata

SEQ ID NO: 8978 - RNA, 50 nt, synthetic construct
  source 1..50: mol_type = other RNA
aaaaaaaaaaaaaaaaaaaaaaaaaaaaaaaaaaaaaaaataaatatata

SEQ ID NO: 8979 - RNA, 50 nt, synthetic construct
  source 1..50: mol_type = other RNA
aaataaataaataaaaaaaaaaaaaaaaaaaaaaaaaataaataaatata

SEQ ID NO: 8980 - RNA, 50 nt, synthetic construct
  source 1..50: mol_type = other RNA
aaataaataaataaataaaaaaaaaaaaaaaaaaaaaaaaaataaatata

SEQ ID NO: 8981 - RNA, 50 nt, synthetic construct
  source 1..50: mol_type = other RNA
aaataaaaaaaaaaaaaaaaaaaaaaaaaataaataaataaataaatata

SEQ ID NO: 8982 - RNA, 50 nt, synthetic construct
  source 1..50: mol_type = other RNA
aaaaaaaaaaaaaaaaaaaaaaaaaaaaaaaaaaaaaaaaaaaaaaataa

SEQ ID NO: 8983 - RNA, 50 nt, synthetic construct
  source 1..50: mol_type = other RNA
aaataaataaataaataaaaaaaaaaaaaaaaaaaaaataaataaatata

SEQ ID NO: 8984 - RNA, 50 nt, synthetic construct
  source 1..50: mol_type = other RNA
aaataaataaataaataaataaataaaaaaaaaaaaaaaaaaaaaatata

SEQ ID NO: 8985 - RNA, 50 nt, synthetic construct
  source 1..50: mol_type = other RNA
aaataaataaaaaaaaaaaaaaaaaaaaaataaataaataaataaatata

SEQ ID NO: 8986 - RNA, 50 nt, synthetic construct
  source 1..50: mol_type = other RNA
aaaaaaaaaaaaaaaaaaaaaaaaaaaaaaaaaaaataaataaatatata

SEQ ID NO: 8987 - RNA, 50 nt, synthetic construct
  source 1..50: mol_type = other RNA
aaaaaaaaaaaaaaaaaaaaaaaaaaaaaaaaaaaaaaaaaaataaataa

SEQ ID NO: 8988 - RNA, 50 nt, synthetic construct
  source 1..50: mol_type = other RNA
aaataaataaataaataaataaaaaaaaaaaaaaaaaataaataaatata

SEQ ID NO: 8989 - RNA, 50 nt, synthetic construct
  source 1..50: mol_type = other RNA
aaataaataaataaataaataaataaataaaaaaaaaaaaaaaaaatata

SEQ ID NO: 8990 - RNA, 50 nt, synthetic construct
  source 1..50: mol_type = other RNA
aaaaaaaaaaaaaaaaaaaaaaaaaaaaaaaataaataaataaatatata

SEQ ID NO: 8991 - RNA, 50 nt, synthetic construct
  source 1..50: mol_type = other RNA
aaaaaaaaaaaaaaaaaaaaaaaaaaaaaaaaaaaaaaataaataaataa

SEQ ID NO: 8992 - RNA, 50 nt, synthetic construct
  source 1..50: mol_type = other RNA
aaataaataaataaataaataaataaataaataaaaaaaaaaaaaatata

SEQ ID NO: 8993 - RNA, 50 nt, synthetic construct
  source 1..50: mol_type = other RNA
aaaaaaaaaaaaaaaaaaaaaaaaaaaaaaaaaaaaaaaaaaaaaataaa

SEQ ID NO: 8994 - RNA, 50 nt, synthetic construct
  source 1..50: mol_type = other RNA
aaaaaaaaaaaaaaaaaaaaaaaaaaaaaaaaaaataaataaataaataa

SEQ ID NO: 8995 - RNA, 50 nt, synthetic construct
  source 1..50: mol_type = other RNA
aaataaataaataaataaataaataaataaataaaaaaaaaataaatata

SEQ ID NO: 8996 - RNA, 50 nt, synthetic construct
  source 1..50: mol_type = other RNA
aaataaataaataaataaataaataaataaataaataaaaaaaaaatata

SEQ ID NO: 8997 - RNA, 50 nt, synthetic construct
  source 1..50: mol_type = other RNA
aaaaaaaaaaaaaaaaaaaaaaaataaataaataaataaataaatatata

SEQ ID NO: 8998 - RNA, 50 nt, synthetic construct
  source 1..50: mol_type = other RNA
aaaaaaaaaaaaaaaaaaaaaaaaaaaaaaaaaaaaaaaaaataaataaa

SEQ ID NO: 8999 - RNA, 50 nt, synthetic construct
  source 1..50: mol_type = other RNA
aaaaaaaaaaaaaaaaaaaaaaaaaaaaaaataaataaataaataaataa

SEQ ID NO: 9000 - RNA, 50 nt, synthetic construct
  source 1..50: mol_type = other RNA
aaaaaaaaaaaaaaaaaaaataaataaataaataaataaataaatatata

SEQ ID NO: 9001 - RNA, 50 nt, synthetic construct
  source 1..50: mol_type = other RNA
aaaaaaaaaaaaaaaaaaaaaaaaaaaaaaaaaaaaaataaataaataaa

SEQ ID NO: 9002 - RNA, 50 nt, synthetic construct
  source 1..50: mol_type = other RNA
aaaaaaaaaaaaaaaaaaaaaaaaaaataaataaataaataaataaataa

SEQ ID NO: 9003 - RNA, 50 nt, synthetic construct
  source 1..50: mol_type = other RNA
aaaaaaaaaaaaaaaaaaaaaaaaaaaaaaaaaataaataaataaataaa

SEQ ID NO: 9004 - RNA, 50 nt, synthetic construct
  source 1..50: mol_type = other RNA
aaaaaaaaaaaaaaaaaaaaaaaaaaaaaataaataaataaataaataaa

SEQ ID NO: 9005 - RNA, 50 nt, synthetic construct
  source 1..50: mol_type = other RNA
aaaaaaaaaaaaaaaaaaaaaaaaaataaataaataaataaataaataaa

SEQ ID NO: 9006 - RNA, 50 nt, synthetic construct
  source 1..50: mol_type = other RNA
aaaaaaaaaaaaaaaaaaaaaataaataaataaataaataaataaataaa

SEQ ID NO: 9007 - RNA, 50 nt, synthetic construct
  source 1..50: mol_type = other RNA
aaaaaaaaaaaaaaaaaaaaaaaaaaaaaaaaaaaaaaaaaaaaaaatat

SEQ ID NO: 9008 - RNA, 50 nt, synthetic construct
  source 1..50: mol_type = other RNA
aaaaaaaaaaaaaaaaaaaaaaaaaaaaaaaaaaaaaaaaaaataaatat

SEQ ID NO: 9009 - RNA, 50 nt, synthetic construct
  source 1..50: mol_type = other RNA
aaaaaaaaaaaaaaaaaaaaaaaaaaaaaaaaaaaaaaataaataaatat

SEQ ID NO: 9010 - RNA, 50 nt, synthetic construct
  source 1..50: mol_type = other RNA
aaaaaaaaaaaaaaaaaaaaaaaaaaaaaaaaaaataaataaataaatat

SEQ ID NO: 9011 - RNA, 50 nt, synthetic construct
  source 1..50: mol_type = other RNA
aaataaataaataaataaataaataaatataaataaatataaataaataa

SEQ ID NO: 9012 - RNA, 50 nt, synthetic construct
  source 1..50: mol_type = other RNA
aaataaataaataaataaataaataaataaatataaatataaataaataa

SEQ ID NO: 9013 - RNA, 50 nt, synthetic construct
  source 1..50: mol_type = other RNA
aaaaaaaaaaaaaaaaaaaaaaaaaaaaaaaaaaaaaaaaaaaaaaaata

SEQ ID NO: 9014 - RNA, 50 nt, synthetic construct
  source 1..50: mol_type = other RNA
aaaaaaaaaaaaaaaaaaaaaaaaaaaaaaaaaaaaaaaaaaaataaata

SEQ ID NO: 9015 - RNA, 50 nt, synthetic construct
  source 1..50: mol_type = other RNA
aaaaaaaaaaaaaaaaaaaaaaaaaaaaaaaaaatataaatataaatata

SEQ ID NO: 9016 - RNA, 50 nt, synthetic construct
  source 1..50: mol_type = other RNA
aaaaaaaaaaaaaaaaaaaaaaaaaaaaaaaaaaaaaaaataaataaata

SEQ ID NO: 9017 - RNA, 50 nt, synthetic construct
  source 1..50: mol_type = other RNA
aaaaaaaaaaaaaaaaaaaaaaaaaaaaaataaatataaatataaatata

SEQ ID NO: 9018 - RNA, 50 nt, synthetic construct
  source 1..50: mol_type = other RNA
aaaaaaaaaaaaaaaaaaaaaaaaaaaaaatataaataaatataaatata

SEQ ID NO: 9019 - RNA, 50 nt, synthetic construct
  source 1..50: mol_type = other RNA
aaaaaaaaaaaaaaaaaaaaaaaaaataaataaatataaatataaatata

SEQ ID NO: 9020 - RNA, 50 nt, synthetic construct
  source 1..50: mol_type = other RNA
aaaaaaaaaaaaaaaaaaaaaataaataaatataaatataaataaatata

SEQ ID NO: 9021 - RNA, 50 nt, synthetic construct
  source 1..50: mol_type = other RNA
aaaaaaaaaaaaaaaaaaaaaataaataaatataaataaatataaatata

SEQ ID NO: 9022 - RNA, 50 nt, synthetic construct
  source 1..50: mol_type = other RNA
aaaaaaaaaaaaaaaaaaaaaataaataaataaatataaatataaatata

SEQ ID NO: 9023 - RNA, 50 nt, synthetic construct
  source 1..50: mol_type = other RNA
aaaaaaaaaaaaaaaaaaaaaatataaataaataaataaatataaatata

SEQ ID NO: 9024 - RNA, 50 nt, synthetic construct
  source 1..50: mol_type = other RNA
aaatataaaaaaaaaaaaaaaaaaaaaaaaaaaaaaaaaaaaaaaatata

SEQ ID NO: 9025 - RNA, 50 nt, synthetic construct
  source 1..50: mol_type = other RNA
aaaaaaaaaaaaaaaaaataaataaataaatataaatataaataaatata

SEQ ID NO: 9026 - RNA, 50 nt, synthetic construct
  source 1..50: mol_type = other RNA
aaaaaaaaaaaaaaaaaataaataaataaatataaataaatataaatata

SEQ ID NO: 9027 - RNA, 50 nt, synthetic construct
  source 1..50: mol_type = other RNA
aaaaaaaaaaaaaaaaaataaataaatataaataaataaatataaatata

SEQ ID NO: 9028 - RNA, 50 nt, synthetic construct
  source 1..50: mol_type = other RNA
aaaaaaaaaaaaaaaaaataaataaataaataaatataaatataaatata

SEQ ID NO: 9029 - RNA, 50 nt, synthetic construct
  source 1..50: mol_type = other RNA
aaaaaaaaaaaaaaaaaatataaataaataaataaataaatataaatata

SEQ ID NO: 9030 - RNA, 50 nt, synthetic construct
  source 1..50: mol_type = other RNA
aaataaatataaaaaaaaaaaaaaaaaaaaaaaaaaaaaaaaaaaatata

SEQ ID NO: 9031 - RNA, 50 nt, synthetic construct
  source 1..50: mol_type = other RNA
aaatataaataaaaaaaaaaaaaaaaaaaaaaaaaaaaaaaaaaaatata

SEQ ID NO: 9032 - RNA, 50 nt, synthetic construct
  source 1..50: mol_type = other RNA
aaatataaaaaaaaaaaaaaaaaaaaaaaaaaaaaaaaaaaataaatata

SEQ ID NO: 9033 - RNA, 50 nt, synthetic construct
  source 1..50: mol_type = other RNA
aaataaaaaaaaaaaaaaaaaaaaaaaaaaaaaaaaaaaatataaatata

SEQ ID NO: 9034 - RNA, 50 nt, synthetic construct
  source 1..50: mol_type = other RNA
aaaaaaaaaaaaaataaataaataaataaatataaatataaataaatata

SEQ ID NO: 9035 - RNA, 50 nt, synthetic construct
  source 1..50: mol_type = other RNA
aaaaaaaaaaaaaataaataaataaataaatataaataaatataaatata

SEQ ID NO: 9036 - RNA, 50 nt, synthetic construct
  source 1..50: mol_type = other RNA
aaaaaaaaaaaaaataaatataaataaataaataaataaatataaatata

SEQ ID NO: 9037 - RNA, 50 nt, synthetic construct
  source 1..50: mol_type = other RNA
aaaaaaaaaaaaaatataaataaataaataaatataaataaataaatata

SEQ ID NO: 9038 - RNA, 50 nt, synthetic construct
  source 1..50: mol_type = other RNA
aaataaataaataaataaataaataaatataaataaatataaataaatat

SEQ ID NO: 9039 - RNA, 50 nt, synthetic construct
  source 1..50: mol_type = other RNA
aaatataaataaataaaaaaaaaaaaaaaaaaaaaaaaaaaaaaaatata

SEQ ID NO: 9040 - RNA, 50 nt, synthetic construct
  source 1..50: mol_type = other RNA
aaatataaataaaaaaaaaaaaaaaaaaaaaaaaaaaaaaaataaatata

SEQ ID NO: 9041 - RNA, 50 nt, synthetic construct
  source 1..50: mol_type = other RNA
aaataaaaaaaaaaaaaaaaaaaaaaaaaaaaaaaataaatataaatata

SEQ ID NO: 9042 - RNA, 50 nt, synthetic construct
  source 1..50: mol_type = other RNA
aaataaaaaaaaaaaaaaaaaaaaaaaaaaaaaaaatataaataaatata

SEQ ID NO: 9043 - RNA, 50 nt, synthetic construct
  source 1..50: mol_type = other RNA
aaataaatataaaaaaaaaaaaaaaaaaaaaaaaaaaaaaaataaatata

SEQ ID NO: 9044 - RNA, 50 nt, synthetic construct
  source 1..50: mol_type = other RNA
aaataaatataaataaaaaaaaaaaaaaaaaaaaaaaaaaaaaaaatata

SEQ ID NO: 9045 - RNA, 50 nt, synthetic construct
  source 1..50: mol_type = other RNA
aaatataaaaaaaaaaaaaaaaaaaaaaaaaaaaaaaataaataaatata

SEQ ID NO: 9046 - RNA, 51 nt, synthetic construct
  source 1..51: mol_type = other RNA
aaaaaaaaaaaaaaaaaaaaaaaaaaaaaaaaaaaaaaaaaaaaaaatata

SEQ ID NO: 9047 - RNA, 51 nt, synthetic construct
  source 1..51: mol_type = other RNA
aaaaaaaaaaaaaaaaaaaaaaaaaaaaaaaaaaaaaaaaaaataaatata

SEQ ID NO: 9048 - RNA, 51 nt, synthetic construct
  source 1..51: mol_type = other RNA
aaaaaaaaaaaaaaaaaaaaaaaaaaaaaaaaaaaaaaataaataaatata

SEQ ID NO: 9049 - RNA, 51 nt, synthetic construct
  source 1..51: mol_type = other RNA
aaaaaaaaaaaaaaaaaaaaaaaaaaaaaaaaaaataaataaataaatata

SEQ ID NO: 9050 - RNA, 51 nt, synthetic construct
  source 1..51: mol_type = other RNA
aaaaaaaaaaaaaaaaaaaaaaaaaaaaaaataaataaataaataaatata

SEQ ID NO: 9051 - RNA, 51 nt, synthetic construct
  source 1..51: mol_type = other RNA
aaaaaaaaaaaaaaaaaaaaaaaaaaataaataaataaataaataaatata

SEQ ID NO: 9052 - RNA, 51 nt, synthetic construct
  source 1..51: mol_type = other RNA
aaaaaaaaaaaaaaaaaaaaaaataaataaataaataaataaataaatata

SEQ ID NO: 9053 - RNA, 51 nt, synthetic construct
  source 1..51: mol_type = other RNA
aaataaataaataaataaataaataaatataaatataaataaataaatata

SEQ ID NO: 9054 - RNA, 51 nt, synthetic construct
  source 1..51: mol_type = other RNA
aaataaataaataaataaataaatataaataaatataaataaataaatata

SEQ ID NO: 9055 - RNA, 51 nt, synthetic construct
  source 1..51: mol_type = other RNA
aaataaataaataaataaatataaataaataaatataaataaataaatata

SEQ ID NO: 9056 - RNA, 51 nt, synthetic construct
  source 1..51: mol_type = other RNA
aaaaaaaaaaaaaaaaaaaaaaaaaaaaaaaaaaaaaaaaatataaatata

SEQ ID NO: 9057 - RNA, 51 nt, synthetic construct
  source 1..51: mol_type = other RNA
aaaaaaaaaaaaaaaaaaaaaaaaaaaaataaataaataaatataaatata

SEQ ID NO: 9058 - RNA, 51 nt, synthetic construct
  source 1..51: mol_type = other RNA
aaaaaaaaaaaaaaaaaaaaaaaaataaataaataaataaatataaatata

SEQ ID NO: 9059 - RNA, 51 nt, synthetic construct
  source 1..51: mol_type = other RNA
aaaaaaaaaaaaaaaaaaaaaaaaatataaataaataaataaataaatata

SEQ ID NO: 9060 - RNA, 51 nt, synthetic construct
  source 1..51: mol_type = other RNA
aaataaaaaaaaaaaaaaaaaaaaaaaaaaaaaaaaaaaaaaaaaaatata

SEQ ID NO: 9061 - RNA, 51 nt, synthetic construct
  source 1..51: mol_type = other RNA
aaataaataaaaaaaaaaaaaaaaaaaaaaaaaaaaaaaaaaaaaaatata

SEQ ID NO: 9062 - RNA, 51 nt, synthetic construct
  source 1..51: mol_type = other RNA
aaataaaaaaaaaaaaaaaaaaaaaaaaaaaaaaaaaaataaataaatata

SEQ ID NO: 9063 - RNA, 51 nt, synthetic construct
  source 1..51: mol_type = other RNA
aaataaataaataaaaaaaaaaaaaaaaaaaaaaaaaaaaaaaaaaatata

SEQ ID NO: 9064 - RNA, 51 nt, synthetic construct
  source 1..51: mol_type = other RNA
aaaaaaaaaaaaaaaaaaaaaaaaaaaaaaaaaaaaaaaaaaaaatatata

SEQ ID NO: 9065 - RNA, 51 nt, synthetic construct
  source 1..51: mol_type = other RNA
aaataaataaataaataaaaaaaaaaaaaaaaaaaaaaaaaaaaaaatata

SEQ ID NO: 9066 - RNA, 51 nt, synthetic construct
  source 1..51: mol_type = other RNA
aaataaaaaaaaaaaaaaaaaaaaaaaaaaaaaaataaataaataaatata

SEQ ID NO: 9067 - RNA, 51 nt, synthetic construct
  source 1..51: mol_type = other RNA
aaataaataaataaataaataaaaaaaaaaaaaaaaaaaaaaaaaaatata

SEQ ID NO: 9068 - RNA, 51 nt, synthetic construct
  source 1..51: mol_type = other RNA
aaaaaaaaaaaaaaaaaaaaaaaaaaaaaaaaaaaaaaaaataaatatata

SEQ ID NO: 9069 - RNA, 51 nt, synthetic construct
  source 1..51: mol_type = other RNA
aaaaaaaaaaaaaaaaaaaaaaaaaaaaaaaaaaaaaaaaaaaaaaaataa

SEQ ID NO: 9070 - RNA, 51 nt, synthetic construct
  source 1..51: mol_type = other RNA
aaaaaaaaaaaaaaaaaaaaaaaaaaaaaaaaaaaaataaataaatatata

SEQ ID NO: 9071 - RNA, 51 nt, synthetic construct
  source 1..51: mol_type = other RNA
aaaaaaaaaaaaaaaaaaaaaaaaaaaaaaaaaaaaaaaaaaaataaataa

SEQ ID NO: 9072 - RNA, 51 nt, synthetic construct
  source 1..51: mol_type = other RNA
aaaaaaaaaaaaaaaaaaaaaaaaaaaaaaaaataaataaataaatatata

SEQ ID NO: 9073 - RNA, 51 nt, synthetic construct
  source 1..51: mol_type = other RNA
aaaaaaaaaaaaaaaaaaaaaaaaaaaaaaaaaaaaaaaataaataaataa

SEQ ID NO: 9074 - RNA, 51 nt, synthetic construct
  source 1..51: mol_type = other RNA
aaaaaaaaaaaaaaaaaaaaaaaaaaaaataaataaataaataaatatata

SEQ ID NO: 9075 - RNA, 51 nt, synthetic construct
  source 1..51: mol_type = other RNA
aaaaaaaaaaaaaaaaaaaaaaaaaaaaaaaaaaaaaaaaaaaaaaataaa

SEQ ID NO: 9076 - RNA, 51 nt, synthetic construct
  source 1..51: mol_type = other RNA
aaaaaaaaaaaaaaaaaaaaaaaaaaaaaaaaaaaataaataaataaataa

SEQ ID NO: 9077 - RNA, 51 nt, synthetic construct
  source 1..51: mol_type = other RNA
aaaaaaaaaaaaaaaaaaaaaaaaataaataaataaataaataaatatata

SEQ ID NO: 9078 - RNA, 51 nt, synthetic construct
  source 1..51: mol_type = other RNA
aaaaaaaaaaaaaaaaaaaaaaaaaaaaaaaataaataaataaataaataa

SEQ ID NO: 9079 - RNA, 51 nt, synthetic construct
  source 1..51: mol_type = other RNA
aaaaaaaaaaaaaaaaaaaaaaaaaaaaaaaaaaaaaaataaataaataaa

SEQ ID NO: 9080 - RNA, 51 nt, synthetic construct
  source 1..51: mol_type = other RNA
aaaaaaaaaaaaaaaaaaaaaaaaaaaaaaaaaaataaataaataaataaa

SEQ ID NO: 9081 - RNA, 51 nt, synthetic construct
  source 1..51: mol_type = other RNA
aaaaaaaaaaaaaaaaaaaaaaaaaaataaataaataaataaataaataaa

SEQ ID NO: 9082 - RNA, 51 nt, synthetic construct
  source 1..51: mol_type = other RNA
aaaaaaaaaaaaaaaaaaaaaaaaaaaaaaaaaaaaaaaaaaaaaaaatat

SEQ ID NO: 9083 - RNA, 51 nt, synthetic construct
  source 1..51: mol_type = other RNA
aaaaaaaaaaaaaaaaaaaaaaaaaaaaaaaaaaaaaaaaaaaataaatat

SEQ ID NO: 9084 - RNA, 51 nt, synthetic construct
  source 1..51: mol_type = other RNA
aaaaaaaaaaaaaaaaaaaaaaaaaaaaaaaaaaaaaaaataaataaatat

SEQ ID NO: 9085 - RNA, 51 nt, synthetic construct
  source 1..51: mol_type = other RNA
aaaaaaaaaaaaaaaaaaaaaaaaaaaaaaaaaaaaaaaaaaaaaaaaata

SEQ ID NO: 9086 - RNA, 51 nt, synthetic construct
  source 1..51: mol_type = other RNA
aaataaataaataaataaataaataaatataaatataaataaataaataaa

SEQ ID NO: 9087 - RNA, 51 nt, synthetic construct
  source 1..51: mol_type = other RNA
aaataaataaataaataaatataaataaataaatataaataaataaataaa

SEQ ID NO: 9088 - RNA, 51 nt, synthetic construct
  source 1..51: mol_type = other RNA
aaataaataaataaataaataaatataaatataaataaataaataaataaa

SEQ ID NO: 9089 - RNA, 51 nt, synthetic construct
  source 1..51: mol_type = other RNA
aaaaaaaaaaaaaaaaaaaaaaaaaaaaaaaaaaaaaaaaaaaaataaata

SEQ ID NO: 9090 - RNA, 51 nt, synthetic construct
  source 1..51: mol_type = other RNA
aaaaaaaaaaaaaaaaaaaaaaaaaaaaaaaaaaaaaaaaataaataaata

SEQ ID NO: 9091 - RNA, 51 nt, synthetic construct
  source 1..51: mol_type = other RNA
aaaaaaaaaaaaaaaaaaaaaaaaaaaaaaaaaaaaataaataaataaata

SEQ ID NO: 9092 - RNA, 51 nt, synthetic construct
  source 1..51: mol_type = other RNA
aaaaaaaaaaaaaaaaaaaaaaaaaaatataaataaatataaataaatata

SEQ ID NO: 9093 - RNA, 51 nt, synthetic construct
  source 1..51: mol_type = other RNA
aaaaaaaaaaaaaaaaaaaaaaaaaaaaaaaaataaataaataaataaata

SEQ ID NO: 9094 - RNA, 51 nt, synthetic construct
  source 1..51: mol_type = other RNA
aaaaaaaaaaaaaaaaaaaaaaataaatataaataaatataaataaatata

SEQ ID NO: 9095 - RNA, 51 nt, synthetic construct
  source 1..51: mol_type = other RNA
aaaaaaaaaaaaaaaaaaaaaaaaaaaaataaataaataaataaataaata

SEQ ID NO: 9096 - RNA, 51 nt, synthetic construct
  source 1..51: mol_type = other RNA
aaaaaaaaaaaaaaaaaaaaaaaaataaataaataaataaataaataaata

SEQ ID NO: 9097 - RNA, 51 nt, synthetic construct
  source 1..51: mol_type = other RNA
aaaaaaataaataaataaataaataaatataaatataaataaataaatata

SEQ ID NO: 9098 - RNA, 51 nt, synthetic construct
  source 1..51: mol_type = other RNA
aaataaataaataaataaatataaaaaaaaaaaaaaaaaaaaaaaaatata

SEQ ID NO: 9099 - RNA, 51 nt, synthetic construct
  source 1..51: mol_type = other RNA
aaaaaaaaaaaaaaaaaaaaaaaaaaaaaaaaaaaaaaatataaatatata

SEQ ID NO: 9100 - RNA, 51 nt, synthetic construct
  source 1..51: mol_type = other RNA
aaaaaaaaaaaaaaaaaaaaaaaaaaaaaaaaaaaaaaaaaaaaaatataa

SEQ ID NO: 9101 - RNA, 51 nt, synthetic construct
  source 1..51: mol_type = other RNA
aaatataaataaataaataaataaataaaaaaaaaaaaaaaaaaaaatata

SEQ ID NO: 9102 - RNA, 51 nt, synthetic construct
  source 1..51: mol_type = other RNA
aaaaaaaaaaaaaaaaaaaaaaaaaaaaaaaaaaataaatataaatatata

SEQ ID NO: 9103 - RNA, 51 nt, synthetic construct
  source 1..51: mol_type = other RNA
aaaaaaaaaaaaaaaaaaaaaaaaaaaaaaaaaaaaaaaaaatataaataa

SEQ ID NO: 9104 - RNA, 51 nt, synthetic construct
  source 1..51: mol_type = other RNA
aaaaaaaaaaaaaaaaaaaaaaaaaaaaaaaaaaaaaaaaaataaatataa

SEQ ID NO: 9105 - RNA, 51 nt, synthetic construct
  source 1..51: mol_type = other RNA
aaataaataaataaaaaaaaaaaaaaaaataaatataaataaataaatata

SEQ ID NO: 9106 - RNA, 51 nt, synthetic construct
  source 1..51: mol_type = other RNA
aaatataaataaataaataaataaataaataaaaaaaaaaaaaaaaatata

SEQ ID NO: 9107 - RNA, 51 nt, synthetic construct
  source 1..51: mol_type = other RNA
aaatataaataaataaataaataaataaaaaaaaaaaaaaaaataaatata

SEQ ID NO: 9108 - RNA, 51 nt, synthetic construct
  source 1..51: mol_type = other RNA
aaaaaaaaaaaaaaaaaaaaaaaaaaaaaaatataaataaataaatatata

SEQ ID NO: 9109 - RNA, 51 nt, synthetic construct
  source 1..51: mol_type = other RNA
aaaaaaaaaaaaaaaaaaaaaaaaaaaaaaataaataaatataaatatata

SEQ ID NO: 9110 - RNA, 51 nt, synthetic construct
  source 1..51: mol_type = other RNA
aaaaaaaaaaaaaaaaaaaaaaaaaaaaaaaaaaaaaatataaataaataa

SEQ ID NO: 9111 - RNA, 51 nt, synthetic construct
  source 1..51: mol_type = other RNA
aaaaaaaaaaaaaaaaaaaaaaaaaaaaaaaaaaaaaataaataaatataa

SEQ ID NO: 9112 - RNA, 51 nt, synthetic construct
  source 1..51: mol_type = other RNA
aaaaaaaaaaaaaaaaaaaaaaaaaaaaaaaaaaaaaataaatataaataa

SEQ ID NO: 9113 - RNA, 51 nt, synthetic construct
  source 1..51: mol_type = other RNA
aaataaataaataaaaaaaaaaaaataaataaatataaataaataaatata

SEQ ID NO: 9114 - RNA, 51 nt, synthetic construct
  source 1..51: mol_type = other RNA
aaataaataaataaataaaaaaaaaaaaataaatataaataaataaatata

SEQ ID NO: 9115 - RNA, 51 nt, synthetic construct
  source 1..51: mol_type = other RNA
aaatataaataaataaataaataaataaataaataaaaaaaaaaaaatata

SEQ ID NO: 9116 - RNA, 51 nt, synthetic construct
  source 1..51: mol_type = other RNA
aaaaaaaaaaaaaaaaaaaaaaaaaaataaatataaataaataaatatata

SEQ ID NO: 9117 - RNA, 51 nt, synthetic construct
  source 1..51: mol_type = other RNA
aaaaaaaaaaaaaaaaaaaaaaaaaaataaataaataaatataaatatata

SEQ ID NO: 9118 - RNA, 51 nt, synthetic construct
  source 1..51: mol_type = other RNA
aaaaaaaaaaaaaaaaaaaaaaaaaaatataaataaataaataaatatata

SEQ ID NO: 9119 - RNA, 51 nt, synthetic construct
  source 1..51: mol_type = other RNA
aaaaaaaaaaaaaaaaaaaaaaaaaaataaataaatataaataaatatata

SEQ ID NO: 9120 - RNA, 51 nt, synthetic construct
  source 1..51: mol_type = other RNA
aaaaaaaaaaaaaaaaaaaaaaaaaaaaaaaaaaaaaaaaaaaaatataaa

SEQ ID NO: 9121 - RNA, 51 nt, synthetic construct
  source 1..51: mol_type = other RNA
aaaaaaaaaaaaaaaaaaaaaaaaaaaaaaaaaataaatataaataaataa

SEQ ID NO: 9122 - RNA, 51 nt, synthetic construct
  source 1..51: mol_type = other RNA
aaaaaaaaaaaaaaaaaaaaaaaaaaaaaaaaaataaataaatataaataa

SEQ ID NO: 9123 - RNA, 51 nt, synthetic construct
  source 1..51: mol_type = other RNA
aaataaataaataaataaaaaaaaataaataaatataaataaataaatata

SEQ ID NO: 9124 - RNA, 51 nt, synthetic construct
  source 1..51: mol_type = other RNA
aaataaataaataaaaaaaaataaataaataaatataaataaataaatata

SEQ ID NO: 9125 - RNA, 51 nt, synthetic construct
  source 1..51: mol_type = other RNA
aaataaataaataaataaataaaaaaaaataaatataaataaataaatata

SEQ ID NO: 9126 - RNA, 51 nt, synthetic construct
  source 1..51: mol_type = other RNA
aaaaaaaaaaaaaaaaaaaaaaataaataaatataaataaataaatatata

SEQ ID NO: 9127 - RNA, 51 nt, synthetic construct
  source 1..51: mol_type = other RNA
aaaaaaaaaaaaaaaaaaaaaaataaatataaataaataaataaatatata

SEQ ID NO: 9128 - RNA, 51 nt, synthetic construct
  source 1..51: mol_type = other RNA
aaaaaaaaaaaaaaaaaaaaaaataaataaataaataaatataaatatata

SEQ ID NO: 9129 - RNA, 51 nt, synthetic construct
  source 1..51: mol_type = other RNA
aaataaaaaaaaaaaaaaaaaaaaaaaaaaaaaaaaaaaaaaaaatatata

SEQ ID NO: 9130 - RNA, 51 nt, synthetic construct
  source 1..51: mol_type = other RNA
aaaaaaaaaaaaaaaaaaaaaaaaaaaaaatataaataaataaataaataa

SEQ ID NO: 9131 - RNA, 51 nt, synthetic construct
  source 1..51: mol_type = other RNA
aaaaaaaaaaaaaaaaaaaaaaaaaaaaaataaatataaataaataaataa

SEQ ID NO: 9132 - RNA, 51 nt, synthetic construct
  source 1..51: mol_type = other RNA
aaaaaaaaaaaaaaaaaaaaaaaaaaaaaataaataaataaatataaataa

SEQ ID NO: 9133 - RNA, 51 nt, synthetic construct
  source 1..51: mol_type = other RNA
aaaaaaaaaaaaaaaaaaaaaaaaaaaaaataaataaatataaataaataa

SEQ ID NO: 9134 - RNA, 51 nt, synthetic construct
  source 1..51: mol_type = other RNA
aaataaataaataaataaataaaaataaataaatataaataaataaatata

SEQ ID NO: 9135 - RNA, 51 nt, synthetic construct
  source 1..51: mol_type = other RNA
aaataaataaataaataaaaataaataaataaatataaataaataaatata

SEQ ID NO: 9136 - RNA, 51 nt, synthetic construct
  source 1..51: mol_type = other RNA
aaataaataaataaataaataaataaaaataaatataaataaataaatata

SEQ ID NO: 9137 - RNA, 51 nt, synthetic construct
  source 1..51: mol_type = other RNA
aaataaataaataaataaataaataaataaaaatataaataaataaatata

SEQ ID NO: 9138 - RNA, 51 nt, synthetic construct
  source 1..51: mol_type = other RNA
aaataaataaaaaaaaaaaaaaaaaaaaaaaaaaaaaaaaaaaaatatata

SEQ ID NO: 9139 - RNA, 51 nt, synthetic construct
  source 1..51: mol_type = other RNA
aaataaaaaaaaaaaaaaaaaaaaaaaaaaaaaaaaaaaaataaatatata

SEQ ID NO: 9140 - RNA, 51 nt, synthetic construct
  source 1..51: mol_type = other RNA
aaaaaaaaaaaaaaaaaaaaaaaaaataaatataaataaataaataaataa

SEQ ID NO: 9141 - RNA, 51 nt, synthetic construct
  source 1..51: mol_type = other RNA
aaaaaaaaaaaaaaaaaaaaaaaaaataaataaataaataaatataaataa

SEQ ID NO: 9142 - RNA, 51 nt, synthetic construct
  source 1..51: mol_type = other RNA
aaataaaaaaaaaaaaaaaaaaaaaaaaaaaaaaaaaaaaaaaaaaaataa

SEQ ID NO: 9143 - RNA, 51 nt, synthetic construct
  source 1..51: mol_type = other RNA
aaataaataaataaaaaaaaaaaaaaaaaaaaaaaaaaaaaaaaatatata

SEQ ID NO: 9144 - RNA, 51 nt, synthetic construct
  source 1..51: mol_type = other RNA
aaataaaaaaaaaaaaaaaaaaaaaaaaaaaaaaaaataaataaatatata

SEQ ID NO: 9145 - RNA, 51 nt, synthetic construct
  source 1..51: mol_type = other RNA
aaaaaaaaaaaaaaaaaaaaaataaataaataaataaataaatataaataa

SEQ ID NO: 9146 - RNA, 52 nt, synthetic construct
  source 1..52: mol_type = other RNA
aaaaaaaaaaaaaaaaaaaaaaaaaaaaaaaaaaaaaaaaaaaaaaaatata

SEQ ID NO: 9147 - RNA, 52 nt, synthetic construct
  source 1..52: mol_type = other RNA
aaaaaaaaaaaaaaaaaaaaaaaaaaaaaaaaaaaaaaaaaaaataaatata

SEQ ID NO: 9148 - RNA, 52 nt, synthetic construct
  source 1..52: mol_type = other RNA
aaaaaaaaaaaaaaaaaaaaaaaaaaaaaaaaaaaataaataaataaatata

SEQ ID NO: 9149 - RNA, 52 nt, synthetic construct
  source 1..52: mol_type = other RNA
aaataaaaaaaaaaaaaaaaaaaaaaaaaaaaaaaaaaaaaaaaaaaatata

SEQ ID NO: 9150 - RNA, 52 nt, synthetic construct
  source 1..52: mol_type = other RNA
aaataaataaaaaaaaaaaaaaaaaaaaaaaaaaaaaaaaaaaaaaaatata

SEQ ID NO: 9151 - RNA, 52 nt, synthetic construct
  source 1..52: mol_type = other RNA
aaataaaaaaaaaaaaaaaaaaaaaaaaaaaaaaaaaaaaaaaataaatata

SEQ ID NO: 9152 - RNA, 52 nt, synthetic construct
  source 1..52: mol_type = other RNA
aaataaataaataaaaaaaaaaaaaaaaaaaaaaaaaaaaaaaaaaaatata

SEQ ID NO: 9153 - RNA, 52 nt, synthetic construct
  source 1..52: mol_type = other RNA
aaaaaaaaaaaaaaaaaaaaaaaaaaaaaaaaaaaaaaaaaaaaaatatata

SEQ ID NO: 9154 - RNA, 52 nt, synthetic construct
  source 1..52: mol_type = other RNA
aaaaaaaaaaaaaaaaaaaaaaaaaaaaaaaaaaaaaaaaaataaatatata

SEQ ID NO: 9155 - RNA, 52 nt, synthetic construct
  source 1..52: mol_type = other RNA
aaaaaaaaaaaaaaaaaaaaaaaaaaaaaaaaaaaaaaaaaaaaaaaaataa

SEQ ID NO: 9156 - RNA, 52 nt, synthetic construct
  source 1..52: mol_type = other RNA
aaaaaaaaaaaaaaaaaaaaaaaaaaaaaaaaaaaaaataaataaatatata

SEQ ID NO: 9157 - RNA, 52 nt, synthetic construct
  source 1..52: mol_type = other RNA
aaaaaaaaaaaaaaaaaaaaaaaaaaaaaaaaaaaaaaaaaaaaataaataa

SEQ ID NO: 9158 - RNA, 52 nt, synthetic construct
  source 1..52: mol_type = other RNA
aaaaaaaaaaaaaaaaaaaaaaaaaaaaaaaaaataaataaataaatatata

SEQ ID NO: 9159 - RNA, 52 nt, synthetic construct
  source 1..52: mol_type = other RNA
aaaaaaaaaaaaaaaaaaaaaaaaaaaaaaaaaaaaaaaaataaataaataa

SEQ ID NO: 9160 - RNA, 52 nt, synthetic construct
  source 1..52: mol_type = other RNA
aaaaaaaaaaaaaaaaaaaaaaaaaaaaaaaaaaaaaaaaaaaaaaaataaa

SEQ ID NO: 9161 - RNA, 52 nt, synthetic construct
  source 1..52: mol_type = other RNA
aaaaaaaaaaaaaaaaaaaaaaaaaaaaaaaaaaaaaaaaaaaataaataaa

SEQ ID NO: 9162 - RNA, 52 nt, synthetic construct
  source 1..52: mol_type = other RNA
aaataaataaataaataaataaataaataaaaaaaataaataaataaatata

SEQ ID NO: 9163 - RNA, 52 nt, synthetic construct
  source 1..52: mol_type = other RNA
aaaaaaaaaaaaaaaaaaaaaaaaaaaaaaaaaaaaaaaataaataaataaa

SEQ ID NO: 9164 - RNA, 52 nt, synthetic construct
  source 1..52: mol_type = other RNA
aaataaataaataaataaataaataaataaataaaataaataaataaatata

SEQ ID NO: 9165 - RNA, 52 nt, synthetic construct
  source 1..52: mol_type = other RNA
aaaaaaaaaaaaaaaaaaaaaaaaaaaaaaaaaaaataaataaataaataaa

SEQ ID NO: 9166 - RNA, 52 nt, synthetic construct
  source 1..52: mol_type = other RNA
aaaaaaaaaaaaaaaaaaaaaaaaaaaaaaaaaaaaaaaaaaaaaaaaatat

SEQ ID NO: 9167 - RNA, 52 nt, synthetic construct
  source 1..52: mol_type = other RNA
aaaaaaaaaaaaaaaaaaaaaaaaaaaaaaaaaaaaaaaaaaaaataaatat

SEQ ID NO: 9168 - RNA, 52 nt, synthetic construct
  source 1..52: mol_type = other RNA
aaaaaaaaaaaaaaaaaaaaaaaaaaaaaaaaaaaaaaaaaaaaaaaaaata

SEQ ID NO: 9169 - RNA, 52 nt, synthetic construct
  source 1..52: mol_type = other RNA
aaaaaaaaaaaaaaaaaaaaaaaaaaaaaaaaaaaaaaaaaataaataaata

SEQ ID NO: 9170 - RNA, 52 nt, synthetic construct
  source 1..52: mol_type = other RNA
aaaaaaaaaaaaaaaaaaaaaaaaaaaaaaaaaaaaaataaataaataaata

SEQ ID NO: 9171 - RNA, 52 nt, synthetic construct
  source 1..52: mol_type = other RNA
aaaaaaaaaaaaaaaaaaaaaaaaaaaatataaataaatataaataaatata

SEQ ID NO: 9172 - RNA, 52 nt, synthetic construct
  source 1..52: mol_type = other RNA
aaaaaaaaaaaaaaaaaaaaaaaataaatataaataaatataaataaatata

SEQ ID NO: 9173 - RNA, 52 nt, synthetic construct
  source 1..52: mol_type = other RNA
aaatataaaaaaaaaaaaaaaaaaaaaaaaaaaaaaaaaaaaaaaaaatata

SEQ ID NO: 9174 - RNA, 52 nt, synthetic construct
  source 1..52: mol_type = other RNA
aaaaaaaaaaaaaaaaaaaataaataaatataaataaatataaataaatata

SEQ ID NO: 9175 - RNA, 52 nt, synthetic construct
  source 1..52: mol_type = other RNA
aaaaaaaaaaaaaaaaaaaataaataaataaatataaatataaataaatata

SEQ ID NO: 9176 - RNA, 52 nt, synthetic construct
  source 1..52: mol_type = other RNA
aaatataaataaaaaaaaaaaaaaaaaaaaaaaaaaaaaaaaaaaaaatata

SEQ ID NO: 9177 - RNA, 52 nt, synthetic construct
  source 1..52: mol_type = other RNA
aaataaatataaaaaaaaaaaaaaaaaaaaaaaaaaaaaaaaaaaaaatata

SEQ ID NO: 9178 - RNA, 52 nt, synthetic construct
  source 1..52: mol_type = other RNA
aaatataaaaaaaaaaaaaaaaaaaaaaaaaaaaaaaaaaaaaataaatata

SEQ ID NO: 9179 - RNA, 52 nt, synthetic construct
  source 1..52: mol_type = other RNA
aaataaataaatataaaaaaaaaaaaaaaaaaaaaaaaaaaaaaaaaatata

SEQ ID NO: 9180 - RNA, 52 nt, synthetic construct
  source 1..52: mol_type = other RNA
aaatataaataaataaaaaaaaaaaaaaaaaaaaaaaaaaaaaaaaaatata

SEQ ID NO: 9181 - RNA, 52 nt, synthetic construct
  source 1..52: mol_type = other RNA
aaatataaataaaaaaaaaaaaaaaaaaaaaaaaaaaaaaaaaataaatata

SEQ ID NO: 9182 - RNA, 52 nt, synthetic construct
  source 1..52: mol_type = other RNA
aaatataaaaaaaaaaaaaaaaaaaaaaaaaaaaaaaaaataaataaatata

SEQ ID NO: 9183 - RNA, 52 nt, synthetic construct
  source 1..52: mol_type = other RNA
aaataaataaatataaataaaaaaaaaaaaaaaaaaaaaaaaaaaaaatata

SEQ ID NO: 9184 - RNA, 52 nt, synthetic construct
  source 1..52: mol_type = other RNA
aaataaataaaaaaaaaaaaaaaaaaaaaaaaaaaaaatataaataaatata

SEQ ID NO: 9185 - RNA, 52 nt, synthetic construct
  source 1..52: mol_type = other RNA
aaataaaaaaaaaaaaaaaaaaaaaaaaaaaaaatataaataaataaatata

SEQ ID NO: 9186 - RNA, 52 nt, synthetic construct
  source 1..52: mol_type = other RNA
aaatataaataaataaaaaaaaaaaaaaaaaaaaaaaaaaaaaataaatata

SEQ ID NO: 9187 - RNA, 52 nt, synthetic construct
  source 1..52: mol_type = other RNA
aaatataaaaaaaaaaaaaaaaaaaaaaaaaaaaaataaataaataaatata

SEQ ID NO: 9188 - RNA, 52 nt, synthetic construct
  source 1..52: mol_type = other RNA
aaatataaataaaaaaaaaaaaaaaaaaaaaaaaaaaaaataaataaatata

SEQ ID NO: 9189 - RNA, 52 nt, synthetic construct
  source 1..52: mol_type = other RNA
aaaaaaaaaaaaaaaaaataaataaataaataaataaataaataaataaata

SEQ ID NO: 9190 - RNA, 52 nt, synthetic construct
  source 1..52: mol_type = other RNA
aaataaataaaaaaaaaaaaaaaaaaaaaaaaaataaatataaataaatata

SEQ ID NO: 9191 - RNA, 52 nt, synthetic construct
  source 1..52: mol_type = other RNA
aaataaataaataaaaaaaaaaaaaaaaaaaaaaaaaatataaataaatata

SEQ ID NO: 9192 - RNA, 52 nt, synthetic construct
  source 1..52: mol_type = other RNA
aaataaataaatataaataaataaaaaaaaaaaaaaaaaaaaaaaaaatata

SEQ ID NO: 9193 - RNA, 52 nt, synthetic construct
  source 1..52: mol_type = other RNA
aaataaataaataaatataaataaaaaaaaaaaaaaaaaaaaaaaaaatata

SEQ ID NO: 9194 - RNA, 52 nt, synthetic construct
  source 1..52: mol_type = other RNA
aaataaaaaaaaaaaaaaaaaaaaaaaaaataaatataaataaataaatata

SEQ ID NO: 9195 - RNA, 52 nt, synthetic construct
  source 1..52: mol_type = other RNA
aaataaaaaaaaaaaaaaaaaaaaaaaaaatataaataaataaataaatata

SEQ ID NO: 9196 - RNA, 52 nt, synthetic construct
  source 1..52: mol_type = other RNA
aaatataaataaataaaaaaaaaaaaaaaaaaaaaaaaaataaataaatata

SEQ ID NO: 9197 - RNA, 52 nt, synthetic construct
  source 1..52: mol_type = other RNA
aaatataaataaataaataaaaaaaaaaaaaaaaaaaaaaaaaataaatata

SEQ ID NO: 9198 - RNA, 52 nt, synthetic construct
  source 1..52: mol_type = other RNA
aaaaaaaaaaaaaaaaaaaaaaaaaaaaaaaaaaaaaaaaaaaaaaatataa

SEQ ID NO: 9199 - RNA, 52 nt, synthetic construct
  source 1..52: mol_type = other RNA
aaataaataaataaaaaaaaaaaaaaaaaaaaaataaatataaataaatata

SEQ ID NO: 9200 - RNA, 52 nt, synthetic construct
  source 1..52: mol_type = other RNA
aaataaaaaaaaaaaaaaaaaaaaaataaataaatataaataaataaatata

SEQ ID NO: 9201 - RNA, 52 nt, synthetic construct
  source 1..52: mol_type = other RNA
aaataaaaaaaaaaaaaaaaaaaaaataaatataaataaataaataaatata

SEQ ID NO: 9202 - RNA, 52 nt, synthetic construct
  source 1..52: mol_type = other RNA
aaataaataaaaaaaaaaaaaaaaaaaaaataaatataaataaataaatata

SEQ ID NO: 9203 - RNA, 52 nt, synthetic construct
  source 1..52: mol_type = other RNA
aaataaataaaaaaaaaaaaaaaaaaaaaatataaataaataaataaatata

SEQ ID NO: 9204 - RNA, 52 nt, synthetic construct
  source 1..52: mol_type = other RNA
aaatataaataaataaaaaaaaaaaaaaaaaaaaaataaataaataaatata

SEQ ID NO: 9205 - RNA, 52 nt, synthetic construct
  source 1..52: mol_type = other RNA
aaatataaataaataaataaaaaaaaaaaaaaaaaaaaaataaataaatata

SEQ ID NO: 9206 - RNA, 52 nt, synthetic construct
  source 1..52: mol_type = other RNA
aaaaaaaaaaaaaaaaaaaaaaaaaaaaaaaaaaaatataaataaatatata

SEQ ID NO: 9207 - RNA, 52 nt, synthetic construct
  source 1..52: mol_type = other RNA
aaaaaaaaaaaaaaaaaaaaaaaaaaaaaaaaaaaaaaaaaaatataaataa

SEQ ID NO: 9208 - RNA, 52 nt, synthetic construct
  source 1..52: mol_type = other RNA
aaataaataaatataaataaataaataaataaaaaaaaaaaaaaaaaatata

SEQ ID NO: 9209 - RNA, 52 nt, synthetic construct
  source 1..52: mol_type = other RNA
aaataaataaataaaaaaaaaaaaaaaaaataaatataaataaataaatata

SEQ ID NO: 9210 - RNA, 52 nt, synthetic construct
  source 1..52: mol_type = other RNA
aaataaataaaaaaaaaaaaaaaaaataaatataaataaataaataaatata

SEQ ID NO: 9211 - RNA, 52 nt, synthetic construct
  source 1..52: mol_type = other RNA
aaataaataaataaaaaaaaaaaaaaaaaatataaataaataaataaatata

SEQ ID NO: 9212 - RNA, 52 nt, synthetic construct
  source 1..52: mol_type = other RNA
aaataaataaaaaaaaaaaaaaaaaataaataaatataaataaataaatata

SEQ ID NO: 9213 - RNA, 52 nt, synthetic construct
  source 1..52: mol_type = other RNA
aaatataaataaataaataaaaaaaaaaaaaaaaaataaataaataaatata

SEQ ID NO: 9214 - RNA, 52 nt, synthetic construct
  source 1..52: mol_type = other RNA
aaaaaaaaaaaaaaaaaaaaaaaaaaaaaaaataaataaatataaatatata

SEQ ID NO: 9215 - RNA, 52 nt, synthetic construct
  source 1..52: mol_type = other RNA
aaaaaaaaaaaaaaaaaaaaaaaaaaaaaaaaaaaaaaataaataaatataa

SEQ ID NO: 9216 - RNA, 52 nt, synthetic construct
  source 1..52: mol_type = other RNA
aaaaaaaaaaaaaaaaaaaaaaaaaaaaaaaaaaaaaaataaatataaataa

SEQ ID NO: 9217 - RNA, 52 nt, synthetic construct
  source 1..52: mol_type = other RNA
aaataaataaatataaataaataaataaataaataaaaaaaaaaaaaatata

SEQ ID NO: 9218 - RNA, 52 nt, synthetic construct
  source 1..52: mol_type = other RNA
aaataaatataaataaataaataaataaataaataaaaaaaaaaaaaatata

SEQ ID NO: 9219 - RNA, 52 nt, synthetic construct
  source 1..52: mol_type = other RNA
aaataaataaataaataaaaaaaaaaaaaataaatataaataaataaatata

SEQ ID NO: 9220 - RNA, 52 nt, synthetic construct
  source 1..52: mol_type = other RNA
aaataaataaataaaaaaaaaaaaaataaataaatataaataaataaatata

SEQ ID NO: 9221 - RNA, 52 nt, synthetic construct
  source 1..52: mol_type = other RNA
aaataaataaataaataaaaaaaaaaaaaatataaataaataaataaatata

SEQ ID NO: 9222 - RNA, 52 nt, synthetic construct
  source 1..52: mol_type = other RNA
aaataaataaataaaaaaaaaaaaaataaatataaataaataaataaatata

SEQ ID NO: 9223 - RNA, 52 nt, synthetic construct
  source 1..52: mol_type = other RNA
aaaaaaaaaaaaaaaaaaaaaaaaaaaataaataaataaatataaatatata

SEQ ID NO: 9224 - RNA, 52 nt, synthetic construct
  source 1..52: mol_type = other RNA
aaaaaaaaaaaaaaaaaaaaaaaaaaaaaaaaaaataaataaataaatataa

SEQ ID NO: 9225 - RNA, 52 nt, synthetic construct
  source 1..52: mol_type = other RNA
aaaaaaaaaaaaaaaaaaaaaaaaaaaaaaaaaaataaataaatataaataa

SEQ ID NO: 9226 - RNA, 52 nt, synthetic construct
  source 1..52: mol_type = other RNA
aaataaatataaataaataaataaataaataaataaataaaaaaaaaatata

SEQ ID NO: 9227 - RNA, 52 nt, synthetic construct
  source 1..52: mol_type = other RNA
aaataaataaatataaataaataaataaataaataaataaaaaaaaaatata

SEQ ID NO: 9228 - RNA, 52 nt, synthetic construct
  source 1..52: mol_type = other RNA
aaataaataaatataaataaataaataaataaataaaaaaaaaataaatata

SEQ ID NO: 9229 - RNA, 52 nt, synthetic construct
  source 1..52: mol_type = other RNA
aaataaataaataaaaaaaaaataaataaatataaataaataaataaatata

SEQ ID NO: 9230 - RNA, 52 nt, synthetic construct
  source 1..52: mol_type = other RNA
aaataaataaataaataaaaaaaaaataaataaatataaataaataaatata

SEQ ID NO: 9231 - RNA, 52 nt, synthetic construct
  source 1..52: mol_type = other RNA
aaataaataaataaataaaaaaaaaataaatataaataaataaataaatata

SEQ ID NO: 9232 - RNA, 52 nt, synthetic construct
  source 1..52: mol_type = other RNA
aaaaaaaaaaaaaaaaaaaaaaaataaataaataaataaatataaatatata

SEQ ID NO: 9233 - RNA, 52 nt, synthetic construct
  source 1..52: mol_type = other RNA
aaaaaaaaaaaaaaaaaaaaaaaaaaaaaaaaaaaaaaaaaatataaataaa

SEQ ID NO: 9234 - RNA, 52 nt, synthetic construct
  source 1..52: mol_type = other RNA
aaaaaaaaaaaaaaaaaaaaaaaaaaaaaaataaataaataaatataaataa

SEQ ID NO: 9235 - RNA, 52 nt, synthetic construct
  source 1..52: mol_type = other RNA
aaaaaaaaaaaaaaaaaaaaaaaaaaaaaaataaataaatataaataaataa

SEQ ID NO: 9236 - RNA, 52 nt, synthetic construct
  source 1..52: mol_type = other RNA
aaataaataaatataaataaataaataaataaataaataaataaaaaatata

SEQ ID NO: 9237 - RNA, 52 nt, synthetic construct
  source 1..52: mol_type = other RNA
aaataaatataaataaataaataaataaataaataaataaataaaaaatata

SEQ ID NO: 9238 - RNA, 52 nt, synthetic construct
  source 1..52: mol_type = other RNA
aaaaaaaaaaaaaaaaaaaataaataaataaataaataaatataaatatata

SEQ ID NO: 9239 - RNA, 52 nt, synthetic construct
  source 1..52: mol_type = other RNA
aaataaataaataaataaaaaataaataaatataaataaataaataaatata

SEQ ID NO: 9240 - RNA, 52 nt, synthetic construct
  source 1..52: mol_type = other RNA
aaataaataaataaataaaaaataaataaataaatataaataaataaatata

SEQ ID NO: 9241 - RNA, 52 nt, synthetic construct
  source 1..52: mol_type = other RNA
aaataaataaataaataaataaataaataaaaaataaatataaataaatata

SEQ ID NO: 9242 - RNA, 52 nt, synthetic construct
  source 1..52: mol_type = other RNA
aaataaataaataaataaataaataaataaaaaatataaataaataaatata

SEQ ID NO: 9243 - RNA, 52 nt, synthetic construct
  source 1..52: mol_type = other RNA
aaaaaaaaaaaaaaaaaaaaaaaaaaaaaaaaaaaaaataaatataaataaa

SEQ ID NO: 9244 - RNA, 52 nt, synthetic construct
  source 1..52: mol_type = other RNA
aaataaaaaaaaaaaaaaaaaaaaaaaaaaaaaaaaaaaaaaaaaaaaataa

SEQ ID NO: 9245 - RNA, 52 nt, synthetic construct
  source 1..52: mol_type = other RNA
aaataaataaaaaaaaaaaaaaaaaaaaaaaaaaaaaaaaaaaaaaaaataa

SEQ ID NO: 9246 - RNA, 53 nt, synthetic construct
  source 1..53: mol_type = other RNA
aaaaaaaaaaaaaaaaaaaaaaaaaaaaaaaaaaaaaaaaaaaaaaaaatata

SEQ ID NO: 9247 - RNA, 53 nt, synthetic construct
  source 1..53: mol_type = other RNA
aaaaaaaaaaaaaaaaaaaaaaaaaaaaaaaaaaaaaaaaaaaaataaatata

SEQ ID NO: 9248 - RNA, 53 nt, synthetic construct
  source 1..53: mol_type = other RNA
aaaaaaaaaaaaaaaaaaaaaaaaaaaaaaaaaaaaaaaaataaataaatata

SEQ ID NO: 9249 - RNA, 53 nt, synthetic construct
  source 1..53: mol_type = other RNA
aaaaaaaaaaaaaaaaaaaaaaaaaaaaaaaaaaaaataaataaataaatata

SEQ ID NO: 9250 - RNA, 53 nt, synthetic construct
  source 1..53: mol_type = other RNA
aaaaaaaaaaaaaaaaaaaaaaaaaaaaaaaaataaataaataaataaatata

SEQ ID NO: 9251 - RNA, 53 nt, synthetic construct
  source 1..53: mol_type = other RNA
aaaaaaaaaaaaaaaaaaaaaaaaaaaaataaataaataaataaataaatata

SEQ ID NO: 9252 - RNA, 53 nt, synthetic construct
  source 1..53: mol_type = other RNA
aaaaaaaaaaaaaaaaaaaaaaaaaaaaaaaaaaaaaaaaaaatataaatata

SEQ ID NO: 9253 - RNA, 53 nt, synthetic construct
  source 1..53: mol_type = other RNA
aaaaaaaaaaaaaaaaaaaaaaaaaaaaaaaaaaaaaaataaatataaatata

SEQ ID NO: 9254 - RNA, 53 nt, synthetic construct
  source 1..53: mol_type = other RNA
aaaaaaaaaaaaaaaaaaaaaaaaaaaaaaaaaaaaaaatataaataaatata

SEQ ID NO: 9255 - RNA, 53 nt, synthetic construct
  source 1..53: mol_type = other RNA
aaaaaaaaaaaaaaaaaaaaaaaaaaaaaaaaaaataaataaatataaatata

SEQ ID NO: 9256 - RNA, 53 nt, synthetic construct
  source 1..53: mol_type = other RNA
aaaaaaaaaaaaaaaaaaaaaaaaaaaaaaaaaaatataaataaataaatata

SEQ ID NO: 9257 - RNA, 53 nt, synthetic construct
  source 1..53: mol_type = other RNA
aaaaaaaaaaaaaaaaaaaaaaaaaaaaaaataaataaataaatataaatata

SEQ ID NO: 9258 - RNA, 53 nt, synthetic construct
  source 1..53: mol_type = other RNA
aaaaaaaaaaaaaaaaaaaaaaaaaaaaaaatataaataaataaataaatata

SEQ ID NO: 9259 - RNA, 53 nt, synthetic construct
  source 1..53: mol_type = other RNA
aaaaaaaaaaaaaaaaaaaaaaaaaaataaataaataaataaatataaatata

SEQ ID NO: 9260 - RNA, 53 nt, synthetic construct
  source 1..53: mol_type = other RNA
aaataaaaaaaaaaaaaaaaaaaaaaaaaaaaaaaaaaaaaaaaaaaaatata

SEQ ID NO: 9261 - RNA, 53 nt, synthetic construct
  source 1..53: mol_type = other RNA
aaataaataaaaaaaaaaaaaaaaaaaaaaaaaaaaaaaaaaaaaaaaatata

SEQ ID NO: 9262 - RNA, 53 nt, synthetic construct
  source 1..53: mol_type = other RNA
aaataaaaaaaaaaaaaaaaaaaaaaaaaaaaaaaaaaaaaaaaataaatata

SEQ ID NO: 9263 - RNA, 53 nt, synthetic construct
  source 1..53: mol_type = other RNA
aaataaataaataaaaaaaaaaaaaaaaaaaaaaaaaaaaaaaaaaaaatata

SEQ ID NO: 9264 - RNA, 53 nt, synthetic construct
  source 1..53: mol_type = other RNA
aaataaataaaaaaaaaaaaaaaaaaaaaaaaaaaaaaaaaaaaataaatata

SEQ ID NO: 9265 - RNA, 53 nt, synthetic construct
  source 1..53: mol_type = other RNA
aaataaaaaaaaaaaaaaaaaaaaaaaaaaaaaaaaaaaaataaataaatata

SEQ ID NO: 9266 - RNA, 53 nt, synthetic construct
  source 1..53: mol_type = other RNA
aaataaataaataaaaaaaaaaaaaaaaaaaaaaaaaaaaaaaaataaatata

SEQ ID NO: 9267 - RNA, 53 nt, synthetic construct
  source 1..53: mol_type = other RNA
aaataaataaataaataaaaaaaaaaaaaaaaaaaaaaaaaaaaaaaaatata

SEQ ID NO: 9268 - RNA, 53 nt, synthetic construct
  source 1..53: mol_type = other RNA
aaataaataaaaaaaaaaaaaaaaaaaaaaaaaaaaaaaaataaataaatata

SEQ ID NO: 9269 - RNA, 53 nt, synthetic construct
  source 1..53: mol_type = other RNA
aaataaaaaaaaaaaaaaaaaaaaaaaaaaaaaaaaataaataaataaatata

SEQ ID NO: 9270 - RNA, 53 nt, synthetic construct
  source 1..53: mol_type = other RNA
aaaaaaaaaaaaaaaaaaaaaaaaaaaaaaaaaaaaaaaaaaaaaaatatata

SEQ ID NO: 9271 - RNA, 53 nt, synthetic construct
  source 1..53: mol_type = other RNA
aaataaaaaaaaaaaaaaaaaaaaaaaaaaaaataaataaataaataaatata

SEQ ID NO: 9272 - RNA, 53 nt, synthetic construct
  source 1..53: mol_type = other RNA
aaataaataaataaataaaaaaaaaaaaaaaaaaaaaaaaaaaaataaatata

SEQ ID NO: 9273 - RNA, 53 nt, synthetic construct
  source 1..53: mol_type = other RNA
aaataaataaataaaaaaaaaaaaaaaaaaaaaaaaaaaaataaataaatata

SEQ ID NO: 9274 - RNA, 53 nt, synthetic construct
  source 1..53: mol_type = other RNA
aaataaataaaaaaaaaaaaaaaaaaaaaaaaaaaaataaataaataaatata

SEQ ID NO: 9275 - RNA, 53 nt, synthetic construct
  source 1..53: mol_type = other RNA
aaaaaaaaaaaaaaaaaaaaaaaaaaaaaaaaaaaaaaaaaaataaatatata

SEQ ID NO: 9276 - RNA, 53 nt, synthetic construct
  source 1..53: mol_type = other RNA
aaaaaaaaaaaaaaaaaaaaaaaaaaaaaaaaaaaaaaaaaaaaaaaaaataa

SEQ ID NO: 9277 - RNA, 53 nt, synthetic construct
  source 1..53: mol_type = other RNA
aaaaaaaaaaaaaaaaaaaaaaaaaaaaaaaaaaaaaaataaataaatatata

SEQ ID NO: 9278 - RNA, 53 nt, synthetic construct
  source 1..53: mol_type = other RNA
aaataaaaaaaaaaaaaaaaaaaaaaaaataaataaataaataaataaatata

SEQ ID NO: 9279 - RNA, 53 nt, synthetic construct
  source 1..53: mol_type = other RNA
aaataaataaataaataaaaaaaaaaaaaaaaaaaaaaaaataaataaatata

SEQ ID NO: 9280 - RNA, 53 nt, synthetic construct
  source 1..53: mol_type = other RNA
aaataaataaataaaaaaaaaaaaaaaaaaaaaaaaataaataaataaatata

SEQ ID NO: 9281 - RNA, 53 nt, synthetic construct
  source 1..53: mol_type = other RNA
aaaaaaaaaaaaaaaaaaaaaaaaaaaaaaaaaaaaaaaaaaaaaataaataa

SEQ ID NO: 9282 - RNA, 53 nt, synthetic construct
  source 1..53: mol_type = other RNA
aaataaataaataaataaataaataaataaaaaaaaaaaaaaaaaaaaatata

SEQ ID NO: 9283 - RNA, 53 nt, synthetic construct
  source 1..53: mol_type = other RNA
aaataaataaataaataaaaaaaaaaaaaaaaaaaaataaataaataaatata

SEQ ID NO: 9284 - RNA, 53 nt, synthetic construct
  source 1..53: mol_type = other RNA
aaaaaaaaaaaaaaaaaaaaaaaaaaaaaaaaaaataaataaataaatatata

SEQ ID NO: 9285 - RNA, 53 nt, synthetic construct
  source 1..53: mol_type = other RNA
aaaaaaaaaaaaaaaaaaaaaaaaaaaaaaaaaaaaaaaaaataaataaataa

SEQ ID NO: 9286 - RNA, 53 nt, synthetic construct
  source 1..53: mol_type = other RNA
aaataaataaataaataaataaataaataaaaaaaaaaaaaaaaataaatata

SEQ ID NO: 9287 - RNA, 53 nt, synthetic construct
  source 1..53: mol_type = other RNA
aaaaaaaaaaaaaaaaaaaaaaaaaaaaaaaaaaaaaaaaaaaaaaaaataaa

SEQ ID NO: 9288 - RNA, 53 nt, synthetic construct
  source 1..53: mol_type = other RNA
aaaaaaaaaaaaaaaaaaaaaaaaaaaaaaaaaaaaaataaataaataaataa

SEQ ID NO: 9289 - RNA, 53 nt, synthetic construct
  source 1..53: mol_type = other RNA
aaaaaaaaaaaaaaaaaaaaaaaaaaaaaaaaaaaaaaaaaaaaataaataaa

SEQ ID NO: 9290 - RNA, 53 nt, synthetic construct
  source 1..53: mol_type = other RNA
aaaaaaaaaaaaaaaaaaaaaaaaaaaaaaaaaaaaaaaaataaataaataaa

SEQ ID NO: 9291 - RNA, 53 nt, synthetic construct
  source 1..53: mol_type = other RNA
aaaaaaaaaaaaaaaaaaaaaaaaaaaaaaaaaaaaataaataaataaataaa

SEQ ID NO: 9292 - RNA, 53 nt, synthetic construct
  source 1..53: mol_type = other RNA
aaaaaaaaaaaaaaaaaaaaaaaaaaaaaaaaaaaaaaaaaaaaaaaaaatat

SEQ ID NO: 9293 - RNA, 53 nt, synthetic construct
  source 1..53: mol_type = other RNA
aaaaaaaaaaaaaaaaaaaaaaaaaaaaaaaaaaaaaaaaaaaaaataaatat

SEQ ID NO: 9294 - RNA, 53 nt, synthetic construct
  source 1..53: mol_type = other RNA
aaaaaaaaaaaaaaaaataaataaataaataaataaataaataaataaataaa

SEQ ID NO: 9295 - RNA, 53 nt, synthetic construct
  source 1..53: mol_type = other RNA
aaaaaaaaaaaaaaaaaaaaaaaaaaaaaaaaaaaaaaaaaataaataaatat

SEQ ID NO: 9296 - RNA, 53 nt, synthetic construct
  source 1..53: mol_type = other RNA
aaaaaaaaaaaaaaaaaaaaaaaaaaaaaaaaaaaaaataaataaataaatat

SEQ ID NO: 9297 - RNA, 53 nt, synthetic construct
  source 1..53: mol_type = other RNA
aaaaaaaaaaaaaaaaaaaaaaaaaaaaaaaaaataaataaataaataaatat

SEQ ID NO: 9298 - RNA, 53 nt, synthetic construct
  source 1..53: mol_type = other RNA
aaaaaaaaaaaaaaaaaaaaaaaaaaaaaataaataaataaataaataaatat

SEQ ID NO: 9299 - RNA, 53 nt, synthetic construct
  source 1..53: mol_type = other RNA
aaaaaaaaaaaaaaaaaaaaaaaaaaaaaaaaaaaaaaaaaaaaaaaaaaata

SEQ ID NO: 9300 - RNA, 53 nt, synthetic construct
  source 1..53: mol_type = other RNA
aaaaaaaaaaaaaaaaaaaaaaaaaaaaaaaaaaaaaaaaaaaaaaataaata

SEQ ID NO: 9301 - RNA, 53 nt, synthetic construct
  source 1..53: mol_type = other RNA
aaaaaaaaaaaaaaaaaaaaaaaaaaaaaaaaaaaaatataaatataaatata

SEQ ID NO: 9302 - RNA, 53 nt, synthetic construct
  source 1..53: mol_type = other RNA
aaaaaaaaaaaaaaaaaaaaaaaaaaaaaaaaaaaaaaaaaaataaataaata

SEQ ID NO: 9303 - RNA, 53 nt, synthetic construct
  source 1..53: mol_type = other RNA
aaaaaaaaaaaaaaaaaaaaaaaaaaaaaaaaatataaatataaataaatata

SEQ ID NO: 9304 - RNA, 53 nt, synthetic construct
  source 1..53: mol_type = other RNA
aaaaaaaaaaaaaaaaaaaaaaaaaaaaaaaaaaaaaaataaataaataaata

SEQ ID NO: 9305 - RNA, 53 nt, synthetic construct
  source 1..53: mol_type = other RNA
aaaaaaaaaaaaaaaaaaaaaaaaaaaaataaatataaatataaataaatata

SEQ ID NO: 9306 - RNA, 53 nt, synthetic construct
  source 1..53: mol_type = other RNA
aaaaaaaaaaaaaaaaaaaaaaaaataaataaatataaatataaataaatata

SEQ ID NO: 9307 - RNA, 53 nt, synthetic construct
  source 1..53: mol_type = other RNA
aaataaataaataaatataaaaaaaaaaaaaaaaaaaaaaaaaaaaaaatata

SEQ ID NO: 9308 - RNA, 53 nt, synthetic construct
  source 1..53: mol_type = other RNA
aaataaaaaaaaaaaaaaaaaaaaaaaaaaaaaaatataaataaataaatata

SEQ ID NO: 9309 - RNA, 53 nt, synthetic construct
  source 1..53: mol_type = other RNA
aaataaaaaaaaaaaaaaaaaaaaaaaaaaatataaataaataaataaatata

SEQ ID NO: 9310 - RNA, 53 nt, synthetic construct
  source 1..53: mol_type = other RNA
aaataaataaatataaaaaaaaaaaaaaaaaaaaaaaaaaataaataaatata

SEQ ID NO: 9311 - RNA, 53 nt, synthetic construct
  source 1..53: mol_type = other RNA
aaataaataaaaaaaaaaaaaaaaaaaaaaaaaaatataaataaataaatata

SEQ ID NO: 9312 - RNA, 53 nt, synthetic construct
  source 1..53: mol_type = other RNA
aaaaaaaaaaaaaaaaaaaaaaaaaaaaaaaaaaaaaaaaaaaaaaaatataa

SEQ ID NO: 9313 - RNA, 53 nt, synthetic construct
  source 1..53: mol_type = other RNA
aaataaaaaaaaaaaaaaaaaaaaaaataaataaataaataaatataaatata

SEQ ID NO: 9314 - RNA, 53 nt, synthetic construct
  source 1..53: mol_type = other RNA
aaataaataaatataaaaaaaaaaaaaaaaaaaaaaataaataaataaatata

SEQ ID NO: 9315 - RNA, 53 nt, synthetic construct
  source 1..53: mol_type = other RNA
aaataaataaataaaaaaaaaaaaaaaaaaaaaaatataaataaataaatata

SEQ ID NO: 9316 - RNA, 53 nt, synthetic construct
  source 1..53: mol_type = other RNA
aaaaaaaaaaaaaaaaaaaaaaaaaaaaaaaaaaaaaaaaaaaatataaataa

SEQ ID NO: 9317 - RNA, 53 nt, synthetic construct
  source 1..53: mol_type = other RNA
aaaaaaaaaaaaaaaaaaaaaaaaaaaaaaaaaaaaaaaaaaaataaatataa

SEQ ID NO: 9318 - RNA, 53 nt, synthetic construct
  source 1..53: mol_type = other RNA
aaataaataaaaaaaaaaaaaaaaaaataaataaataaataaatataaatata

SEQ ID NO: 9319 - RNA, 53 nt, synthetic construct
  source 1..53: mol_type = other RNA
aaataaaaaaaaaaaaaaaaaaataaataaataaataaataaatataaatata

SEQ ID NO: 9320 - RNA, 53 nt, synthetic construct
  source 1..53: mol_type = other RNA
aaataaataaataaataaataaataaatataaaaaaaaaaaaaaaaaaatata

SEQ ID NO: 9321 - RNA, 53 nt, synthetic construct
  source 1..53: mol_type = other RNA
aaataaataaatataaataaaaaaaaaaaaaaaaaaataaataaataaatata

SEQ ID NO: 9322 - RNA, 53 nt, synthetic construct
  source 1..53: mol_type = other RNA
aaataaataaataaataaatataaaaaaaaaaaaaaaaaaataaataaatata

SEQ ID NO: 9323 - RNA, 53 nt, synthetic construct
  source 1..53: mol_type = other RNA
aaataaataaataaataaaaaaaaaaaaaaaaaaatataaataaataaatata

SEQ ID NO: 9324 - RNA, 53 nt, synthetic construct
  source 1..53: mol_type = other RNA
aaaaaaaaaaaaaaaaaaaaaaaaaaaaaaaaatatataaataaataaatata

SEQ ID NO: 9325 - RNA, 53 nt, synthetic construct
  source 1..53: mol_type = other RNA
aaaaaaaaaaaaaaaaaaaaaaaaaaaaaaaaaaaaaaaatataaataaataa

SEQ ID NO: 9326 - RNA, 53 nt, synthetic construct
  source 1..53: mol_type = other RNA
aaaaaaaaaaaaaaaaaaaaaaaaaaaaaaaaaaaaaaaataaatataaataa

SEQ ID NO: 9327 - RNA, 53 nt, synthetic construct
  source 1..53: mol_type = other RNA
aaaaaaaaaaaaaaaaaaaaaaaaaaaaaaaaaaaaaaaataaataaatataa

SEQ ID NO: 9328 - RNA, 53 nt, synthetic construct
  source 1..53: mol_type = other RNA
aaataaataaaaaaaaaaaaaaataaataaataaataaataaatataaatata

SEQ ID NO: 9329 - RNA, 53 nt, synthetic construct
  source 1..53: mol_type = other RNA
aaataaaaaaaaaaaaaaataaataaataaataaataaataaatataaatata

SEQ ID NO: 9330 - RNA, 53 nt, synthetic construct
  source 1..53: mol_type = other RNA
aaataaataaataaataaataaataaatataaaaaaaaaaaaaaataaatata

SEQ ID NO: 9331 - RNA, 53 nt, synthetic construct
  source 1..53: mol_type = other RNA
aaataaataaatataaataaataaaaaaaaaaaaaaataaataaataaatata

SEQ ID NO: 9332 - RNA, 53 nt, synthetic construct
  source 1..53: mol_type = other RNA
aaataaataaataaataaatataaaaaaaaaaaaaaataaataaataaatata

SEQ ID NO: 9333 - RNA, 53 nt, synthetic construct
  source 1..53: mol_type = other RNA
aaaaaaaaaaaaaaaaaaaaaaaaaaaaataaatatataaataaataaatata

SEQ ID NO: 9334 - RNA, 53 nt, synthetic construct
  source 1..53: mol_type = other RNA
aaaaaaaaaaaaaaaaaaaaaaaaaaaaaaaaaaaataaatataaataaataa

SEQ ID NO: 9335 - RNA, 53 nt, synthetic construct
  source 1..53: mol_type = other RNA
aaaaaaaaaaaaaaaaaaaaaaaaaaaaaaaaaaaataaataaatataaataa

SEQ ID NO: 9336 - RNA, 53 nt, synthetic construct
  source 1..53: mol_type = other RNA
aaataaataaaaaaaaaaataaataaataaataaataaataaatataaatata

SEQ ID NO: 9337 - RNA, 53 nt, synthetic construct
  source 1..53: mol_type = other RNA
aaaaaaaaaaaaaaaaaaaaaaaaaaaaaaaaaaaaaaaaaaatataaataaa

SEQ ID NO: 9338 - RNA, 53 nt, synthetic construct
  source 1..53: mol_type = other RNA
aaaaaaaaaaaaaaaaaaaaaaaaaaaaaaaaaaaaaaataaataaatataaa

SEQ ID NO: 9339 - RNA, 53 nt, synthetic construct
  source 1..53: mol_type = other RNA
aaaaaaaaaaaaaaaaaaaaaaaaaaaaaaaaaaaaaaataaatataaataaa

SEQ ID NO: 9340 - RNA, 53 nt, synthetic construct
  source 1..53: mol_type = other RNA
aaataaaaaaaaaaaaaaaaaaaaaaaaaaaaaaaaaaaaaaaaaaaaaataa

SEQ ID NO: 9341 - RNA, 53 nt, synthetic construct
  source 1..53: mol_type = other RNA
aaaaaaaaaaaaaaaaaaaaaaaaaaaaaaaaaaataaataaataaatataaa

SEQ ID NO: 9342 - RNA, 53 nt, synthetic construct
  source 1..53: mol_type = other RNA
aaaaaaaaaaaaaaaaaaaaaaaaaaaaaaaaaaataaataaatataaataaa

SEQ ID NO: 9343 - RNA, 53 nt, synthetic construct
  source 1..53: mol_type = other RNA
aaaaaaaaaaaaaaaaaaaaaaaaaaaaaaaaaaatataaataaataaataaa

SEQ ID NO: 9344 - RNA, 53 nt, synthetic construct
  source 1..53: mol_type = other RNA
aaataaaaaaaaaaaaaaaaaaaaaaaaaaaaaaaaaaaaaaaaaataaataa

SEQ ID NO: 9345 - RNA, 53 nt, synthetic construct
  source 1..53: mol_type = other RNA
aaaaaaaaaaaaaaaaaaaaaaaaaaaaaaataaataaataaatataaataaa

SEQ ID NO: 9346 - RNA, 53 nt, synthetic construct
  source 1..53: mol_type = other RNA
aaaaaaaaaaaaaaaaaaaaaaaaaaaaaaataaataaataaataaatataaa

SEQ ID NO: 9347 - RNA, 53 nt, synthetic construct
  source 1..53: mol_type = other RNA
aaaaaaaaaaaaaaaaaaaaaaaaaaaaaaataaataaatataaataaataaa

SEQ ID NO: 9348 - RNA, 54 nt, synthetic construct
  source 1..54: mol_type = other RNA
aaaaaaaaaaaaaaaaaaaaaaaaaaaaaaaaaaaaaaaaaaaaaaaaaatata

SEQ ID NO: 9349 - RNA, 54 nt, synthetic construct
  source 1..54: mol_type = other RNA
aaaaaaaaaaaaaaaaaaaaaaaaaaaaaaaaaaaaaaaaaaaaaataaatata

SEQ ID NO: 9350 - RNA, 54 nt, synthetic construct
  source 1..54: mol_type = other RNA
aaaaaaaaaaaaaaaaaaaaaaaaaaaaaaaaaaaaaaaaaataaataaatata

SEQ ID NO: 9351 - RNA, 54 nt, synthetic construct
  source 1..54: mol_type = other RNA
aaaaaaaaaaaaaaaaaaaaaaaaaaaaaaaaaaaaaataaataaataaatata

SEQ ID NO: 9352 - RNA, 54 nt, synthetic construct
  source 1..54: mol_type = other RNA
aaaaaaaaaaaaaaaaaaaaaaaaaaaaaaaaaataaataaataaataaatata

SEQ ID NO: 9353 - RNA, 54 nt, synthetic construct
  source 1..54: mol_type = other RNA
aaaaaaaaaaaaaaaaaaaaaaaaaaaaaataaataaataaataaataaatata

SEQ ID NO: 9354 - RNA, 54 nt, synthetic construct
  source 1..54: mol_type = other RNA
aaaaaaaaaaaaaaaaaaaaaaaaaataaataaataaataaataaataaatata

SEQ ID NO: 9355 - RNA, 54 nt, synthetic construct
  source 1..54: mol_type = other RNA
aaaaaaaaaaaaaaaaaaaaaataaataaataaataaataaataaataaatata

SEQ ID NO: 9356 - RNA, 54 nt, synthetic construct
  source 1..54: mol_type = other RNA
aaaaaaaaaaaaaaaaaaaaaaaaaaaaaaaaaaaaaaaatataaataaatata

SEQ ID NO: 9357 - RNA, 54 nt, synthetic construct
  source 1..54: mol_type = other RNA
aaaaaaaaaaaaaaaaaaaaaaaaaaaaaaaaaaaaaaaataaatataaatata

SEQ ID NO: 9358 - RNA, 54 nt, synthetic construct
  source 1..54: mol_type = other RNA
aaaaaaaaaaaaaaaaaaaaaaaaaaaaaaaaaaaataaatataaataaatata

SEQ ID NO: 9359 - RNA, 54 nt, synthetic construct
  source 1..54: mol_type = other RNA
aaaaaaaaaaaaaaaaaaaaaaaaaaaaaaaaaaaataaataaatataaatata

SEQ ID NO: 9360 - RNA, 54 nt, synthetic construct
  source 1..54: mol_type = other RNA
aaaaaaaaaaaaaaaaaaaaaaaaaaaaaaaatataaataaataaataaatata

SEQ ID NO: 9361 - RNA, 54 nt, synthetic construct
  source 1..54: mol_type = other RNA
aaaaaaaaaaaaaaaaaaaaaaaaaaaatataaataaataaataaataaatata

SEQ ID NO: 9362 - RNA, 54 nt, synthetic construct
  source 1..54: mol_type = other RNA
aaataaaaaaaaaaaaaaaaaaaaaaaaaaaaaaaaaaaaaaaaaaaaaatata

SEQ ID NO: 9363 - RNA, 54 nt, synthetic construct
  source 1..54: mol_type = other RNA
aaaaaaaaaaaaaaaaaaaaaaaataaatataaataaataaataaataaatata

SEQ ID NO: 9364 - RNA, 54 nt, synthetic construct
  source 1..54: mol_type = other RNA
aaaaaaaaaaaaaaaaaaaaaaaatataaataaataaataaataaataaatata

SEQ ID NO: 9365 - RNA, 54 nt, synthetic construct
  source 1..54: mol_type = other RNA
aaaaaaaaaaaaaaaaaaaataaataaatataaataaataaataaataaatata

SEQ ID NO: 9366 - RNA, 54 nt, synthetic construct
  source 1..54: mol_type = other RNA
aaaaaaaaaaaaaaaaaaaataaatataaataaataaataaataaataaatata

SEQ ID NO: 9367 - RNA, 54 nt, synthetic construct
  source 1..54: mol_type = other RNA
aaataaataaataaataaaaaaaaaaaaaaaaaaaaaaaaaaaaaataaatata

SEQ ID NO: 9368 - RNA, 54 nt, synthetic construct
  source 1..54: mol_type = other RNA
aaaaaaaaaaaaaaaaaaaaaaaaaaaaaaaaaaaaaaaaaaaaaaaaaaataa

SEQ ID NO: 9369 - RNA, 54 nt, synthetic construct
  source 1..54: mol_type = other RNA
aaaaaaaaaaaaaaaaaaaaaaaaaaaaaaaaaaaaaaaaaaaaaaaaaataaa

SEQ ID NO: 9370 - RNA, 54 nt, synthetic construct
  source 1..54: mol_type = other RNA
aaaaaaaaaaaaaaaaaaaaaaaaaaaaaaaaaaaaaaaaaataaataaataaa

SEQ ID NO: 9371 - RNA, 54 nt, synthetic construct
  source 1..54: mol_type = other RNA
aaaaaaaaaaaaaaaaaaaaaaaaaaaaaaataaataaataaataaataaataa

SEQ ID NO: 9372 - RNA, 54 nt, synthetic construct
  source 1..54: mol_type = other RNA
aaaaaaaaaaaaaaaaaaaaaaaaaaaaaaaaaaaaaataaataaataaataaa

SEQ ID NO: 9373 - RNA, 54 nt, synthetic construct
  source 1..54: mol_type = other RNA
aaaaaaaaaaaaaaaaaaaaaaaaaaaaaaaaaataaataaataaataaataaa

SEQ ID NO: 9374 - RNA, 54 nt, synthetic construct
  source 1..54: mol_type = other RNA
aaaaaaaaaaaaaaaaaaaaaaaaaaaaaaaaaaaaaaaaaaaaaaaaaaaata

SEQ ID NO: 9375 - RNA, 54 nt, synthetic construct
  source 1..54: mol_type = other RNA
aaaaaaaaaaaaaaaaaaaaaaaaaaaaaaaaaaaaaaaaaaaaaaaataaata

SEQ ID NO: 9376 - RNA, 54 nt, synthetic construct
  source 1..54: mol_type = other RNA
aaaaaaaaaaaaaaaaaaaaaaaaaaaaaaaaaaaaaatataaatataaatata

SEQ ID NO: 9377 - RNA, 54 nt, synthetic construct
  source 1..54: mol_type = other RNA
aaaaaaaaaaaaaaaaaaaaaaaaaaaaaaaaaaaaaaaaaaaataaataaata

SEQ ID NO: 9378 - RNA, 54 nt, synthetic construct
  source 1..54: mol_type = other RNA
aaaaaaaaaaaaaaaaaaaaaaaaaaaaaaaaaatataaataaatataaatata

SEQ ID NO: 9379 - RNA, 54 nt, synthetic construct
  source 1..54: mol_type = other RNA
aaaaaaaaaaaaaaaaaaaaaaaaaaaaaaaaaatataaatataaataaatata

SEQ ID NO: 9380 - RNA, 54 nt, synthetic construct
  source 1..54: mol_type = other RNA
aaaaaaaaaaaaaaaaaaaaaaaaaaaaaaaaaataaatataaatataaatata

SEQ ID NO: 9381 - RNA, 54 nt, synthetic construct
  source 1..54: mol_type = other RNA
aaaaaaaaaaaaaaaaaaaaaaaaaataaatataaataaatataaataaatata

SEQ ID NO: 9382 - RNA, 54 nt, synthetic construct
  source 1..54: mol_type = other RNA
aaaaaaaaaaaaaaaaaaaaaaaaaatataaatataaataaataaataaatata

SEQ ID NO: 9383 - RNA, 54 nt, synthetic construct
  source 1..54: mol_type = other RNA
aaaaaaaaaaaaaaaaaaaaaataaataaatataaataaatataaataaatata

SEQ ID NO: 9384 - RNA, 54 nt, synthetic construct
  source 1..54: mol_type = other RNA
aaaaaaaaaaaaaaaaaaaaaataaatataaatataaataaataaataaatata

SEQ ID NO: 9385 - RNA, 54 nt, synthetic construct
  source 1..54: mol_type = other RNA
aaaaaaaaaaaaaaaaaaaaaatataaatataaataaataaataaataaatata

SEQ ID NO: 9386 - RNA, 54 nt, synthetic construct
  source 1..54: mol_type = other RNA
aaaaaaaaaaaaaaaaaataaataaatataaatataaataaataaataaatata

SEQ ID NO: 9387 - RNA, 54 nt, synthetic construct
  source 1..54: mol_type = other RNA
aaaaaaaaaaaaaaaaaatataaataaatataaataaataaataaataaatata

SEQ ID NO: 9388 - RNA, 54 nt, synthetic construct
  source 1..54: mol_type = other RNA
aaaaaaaaaaaaaaaaaatataaatataaataaataaataaataaataaatata

SEQ ID NO: 9389 - RNA, 54 nt, synthetic construct
  source 1..54: mol_type = other RNA
aaaaaaaaaaaaaaaaaataaatataaatataaataaataaataaataaatata

SEQ ID NO: 9390 - RNA, 54 nt, synthetic construct
  source 1..54: mol_type = other RNA
aaaaaaaaaaaaaaaaaaaaaaaaaaaaaaaaaaaaaaaaaatatataaatata

SEQ ID NO: 9391 - RNA, 54 nt, synthetic construct
  source 1..54: mol_type = other RNA
aaataaataaataaatataaaaaaaaaaaaaaaaaaaaaaaaaaaataaatata

SEQ ID NO: 9392 - RNA, 54 nt, synthetic construct
  source 1..54: mol_type = other RNA
aaatataaataaataaataaataaaaaaaaaaaaaaaaaaaaaaaataaatata

SEQ ID NO: 9393 - RNA, 54 nt, synthetic construct
  source 1..54: mol_type = other RNA
aaaaaaaaaaaaaaaaaaaaaaaaaaaaaaaaaaaaaataaatatataaatata

SEQ ID NO: 9394 - RNA, 54 nt, synthetic construct
  source 1..54: mol_type = other RNA
aaaaaaaaaaaaaaaaaaaaaaaaaaaaaaaaaaaaaatatataaataaatata

SEQ ID NO: 9395 - RNA, 54 nt, synthetic construct
  source 1..54: mol_type = other RNA
aaatataaataaataaataaataaataaaaaaaaaaaaaaaaaaaataaatata

SEQ ID NO: 9396 - RNA, 54 nt, synthetic construct
  source 1..54: mol_type = other RNA
aaaaaaaaaaaaaaaaaaaaaaaaaaaaaaaaaataaataaatatataaatata

SEQ ID NO: 9397 - RNA, 54 nt, synthetic construct
  source 1..54: mol_type = other RNA
aaaaaaaaaaaaaaaaaaaaaaaaaaaaaaaaaataaatatataaataaatata

SEQ ID NO: 9398 - RNA, 54 nt, synthetic construct
  source 1..54: mol_type = other RNA
aaaaaaaaaaaaaaaaaaaaaaaaaaaaaaaaaaaaaaaaataaataaatataa

SEQ ID NO: 9399 - RNA, 54 nt, synthetic construct
  source 1..54: mol_type = other RNA
aaaaaaaaaaaaaaaaaaaaaaaaaaaaaataaataaatataaataaatatata

SEQ ID NO: 9400 - RNA, 54 nt, synthetic construct
  source 1..54: mol_type = other RNA
aaaaaaaaaaaaaaaaaaaaaaaaaaaaaataaataaatatataaataaatata

SEQ ID NO: 9401 - RNA, 54 nt, synthetic construct
  source 1..54: mol_type = other RNA
aaaaaaaaaaaaaaaaaaaaaaaaaaaaaaaaaaaaataaataaataaatataa

SEQ ID NO: 9402 - RNA, 54 nt, synthetic construct
  source 1..54: mol_type = other RNA
aaaaaaaaaaaaaaaaaaaaaaaaaatatataaataaataaataaataaatata

SEQ ID NO: 9403 - RNA, 54 nt, synthetic construct
  source 1..54: mol_type = other RNA
aaaaaaaaaaaaaaaaaaaaaaaaaaaaaaaaataaataaataaatataaataa

SEQ ID NO: 9404 - RNA, 54 nt, synthetic construct
  source 1..54: mol_type = other RNA
aaaaaaaaaaaaaaaaaaaaaataaatatataaataaataaataaataaatata

SEQ ID NO: 9405 - RNA, 54 nt, synthetic construct
  source 1..54: mol_type = other RNA
aaaaaaaaaaaaaaaaaaaaaaaaaaaaaaaaaaaaaaaatataaataaataaa

SEQ ID NO: 9406 - RNA, 54 nt, synthetic construct
  source 1..54: mol_type = other RNA
aaaaaaaaaaaaaaaaaaaaaaaaaaaaatataaataaataaataaataaataa

SEQ ID NO: 9407 - RNA, 54 nt, synthetic construct
  source 1..54: mol_type = other RNA
aaaaaaaaaaaaaaaaaaaaaaaaaaaaataaataaataaataaatataaataa

SEQ ID NO: 9408 - RNA, 54 nt, synthetic construct
  source 1..54: mol_type = other RNA
aaaaaaaaaaaaaaaaaaaaaaaaaaaaataaataaataaatataaataaataa

SEQ ID NO: 9409 - RNA, 54 nt, synthetic construct
  source 1..54: mol_type = other RNA
aaaaaaaaaaaaaaaaaataaataaatatataaataaataaataaataaatata

SEQ ID NO: 9410 - RNA, 54 nt, synthetic construct
  source 1..54: mol_type = other RNA
aaaaaaaaaaaaaaaaaaaaaaaaaaaaaaaaaaaataaatataaataaataaa

SEQ ID NO: 9411 - RNA, 54 nt, synthetic construct
  source 1..54: mol_type = other RNA
aaaaaaaaaaaaaaaaaaaaaaaaataaataaataaataaataaatataaataa

SEQ ID NO: 9412 - RNA, 54 nt, synthetic construct
  source 1..54: mol_type = other RNA
aaaaaaaaaaaaaaaaaaaaaaaaataaataaataaataaatataaataaataa

SEQ ID NO: 9413 - RNA, 54 nt, synthetic construct
  source 1..54: mol_type = other RNA
aaatatataaataaataaataaataaataaataaataaataaataaataaatat

SEQ ID NO: 9414 - RNA, 54 nt, synthetic construct
  source 1..54: mol_type = other RNA
aaaaaaaaaaaaaaaaaaaaataaataaataaataaataaatataaataaataa

SEQ ID NO: 9415 - RNA, 54 nt, synthetic construct
  source 1..54: mol_type = other RNA
aaaaaaaaaaaaaaaaaaaaataaataaataaataaataaataaatataaataa

SEQ ID NO: 9416 - RNA, 54 nt, synthetic construct
  source 1..54: mol_type = other RNA
aaaaaaaaaaaaaaaaataaataaataaataaataaataaataaataaatataa

SEQ ID NO: 9417 - RNA, 54 nt, synthetic construct
  source 1..54: mol_type = other RNA
aaaaaaaaaaaaataaataaataaataaataaataaataaataaataaatataa

SEQ ID NO: 9418 - RNA, 54 nt, synthetic construct
  source 1..54: mol_type = other RNA
aaataaaaaaaaaaaaaaaaaaaaaaaaaaaaaaaaaataaataaataaataaa

SEQ ID NO: 9419 - RNA, 54 nt, synthetic construct
  source 1..54: mol_type = other RNA
aaaaaaaaaaaaaaaaaaaaaaaaaaaaaaaaaaaaaaaaaaaaaaaaaataat

SEQ ID NO: 9420 - RNA, 54 nt, synthetic construct
  source 1..54: mol_type = other RNA
aaaaaaaaaaaaaaaaaaaaaaaaaaaaataaataaataaataaatataaatat

SEQ ID NO: 9421 - RNA, 54 nt, synthetic construct
  source 1..54: mol_type = other RNA
aaaaaaaaaaaaaaaaaaaaaaaaaaaaataaataaataaatataaataaatat

SEQ ID NO: 9422 - RNA, 54 nt, synthetic construct
  source 1..54: mol_type = other RNA
aaaaaaaaaaaaaaaaaaaaaaaaataaataaataaataaataaatataaatat

SEQ ID NO: 9423 - RNA, 54 nt, synthetic construct
  source 1..54: mol_type = other RNA
aaaaaaaaaaaaaaaaaaaaaaaaataaataaataaataaatataaataaatat

SEQ ID NO: 9424 - RNA, 54 nt, synthetic construct
  source 1..54: mol_type = other RNA
aaaaaaaaaaaaaaaaaaaaaaaaaaaaaaaaaaaaaaaaaataaataaataat

SEQ ID NO: 9425 - RNA, 54 nt, synthetic construct
  source 1..54: mol_type = other RNA
aaaaaaaaaaaaaaaaaaaaataaataaataaataaataaataaatataaatat

SEQ ID NO: 9426 - RNA, 54 nt, synthetic construct
  source 1..54: mol_type = other RNA
aaaaaaaaaaaaaaaaaaaaataaataaataaataaataaatataaataaatat

SEQ ID NO: 9427 - RNA, 54 nt, synthetic construct
  source 1..54: mol_type = other RNA
aaaaaaaaaaaaaaaaaaaaaaaaaaaaaaaaaaaaaataaataaataaataat

SEQ ID NO: 9428 - RNA, 54 nt, synthetic construct
  source 1..54: mol_type = other RNA
aaaaaaaaaaaataaaaaaaaaaaaaaaaaaaaaaaaaaaaaaaaaaaaatata

SEQ ID NO: 9429 - RNA, 54 nt, synthetic construct
  source 1..54: mol_type = other RNA
aaaaaaaaaaaaaaaaaaaaaaaaaaaaaaaaaaaataaaaaaaaaaaaatata

SEQ ID NO: 9430 - RNA, 54 nt, synthetic construct
  source 1..54: mol_type = other RNA
aaaaaaaaaaaaaaaaaaaaaaaaaaataaaaaaaaaaaaaaaaaaaaaatata

SEQ ID NO: 9431 - RNA, 54 nt, synthetic construct
  source 1..54: mol_type = other RNA
aaaaaaaaaaaaaaaaaaaataaaaaaaaaaaaaaaaaaaaaaaaaaaaatata

SEQ ID NO: 9432 - RNA, 54 nt, synthetic construct
  source 1..54: mol_type = other RNA
aaaaaaaaaaaaaaaaaaaaaaaaaaaaaaaaaaaaaaaaaataaaaaaatata

SEQ ID NO: 9433 - RNA, 54 nt, synthetic construct
  source 1..54: mol_type = other RNA
aaaaaaaaaaaaaaaaaaaaaaaaaaaataaaaaaaaaaaaaaaaaaaaatata

SEQ ID NO: 9434 - RNA, 54 nt, synthetic construct
  source 1..54: mol_type = other RNA
aaaaaaaaaaaaaaaaaaaaaaaaaaaaaaaataaaaaaaaaaaaaaaaatata

SEQ ID NO: 9435 - RNA, 54 nt, synthetic construct
  source 1..54: mol_type = other RNA
aaaaaaaaaaaaaaaaaaaaaaaaaaaaaataaaaaaaaaaaaaaaaaaatata

SEQ ID NO: 9436 - RNA, 54 nt, synthetic construct
  source 1..54: mol_type = other RNA
aaaaaaaaaaaaaaaaaaaaaaaaaataaaaaaaaaaaaaaaaaaaaaaatata

SEQ ID NO: 9437 - RNA, 54 nt, synthetic construct
  source 1..54: mol_type = other RNA
aaaaaaaaaaaaaaaaaaaaaaaaaaaaaaaaaataaaaaaaaaaaaaaatata

SEQ ID NO: 9438 - RNA, 54 nt, synthetic construct
  source 1..54: mol_type = other RNA
aaaaaaaaaaaaaaaaaaaaaaaaaaaaaaaaaaaaaaaaaaataaaaaatata

SEQ ID NO: 9439 - RNA, 54 nt, synthetic construct
  source 1..54: mol_type = other RNA
aaaaaaaaaaaaaaaaaaaaaaaaaaaaaaaaataaaaaaaaaaaaaaaatata

SEQ ID NO: 9440 - RNA, 54 nt, synthetic construct
  source 1..54: mol_type = other RNA
aaaaaaaaaaaaaaaaaataaaaaaaaaaaaaaaaaaaaaaaaaaaaaaatata

SEQ ID NO: 9441 - RNA, 54 nt, synthetic construct
  source 1..54: mol_type = other RNA
aaaaaaaaaaaaaaaaaaaaaaaaaaaaaaataaaaaaaaaaaaaaaaaatata

SEQ ID NO: 9442 - RNA, 54 nt, synthetic construct
  source 1..54: mol_type = other RNA
aaaaaaaaaaaaaaaaataaaaaaaaaaaaaaaaaaaaaaaaaaaaaaaatata

SEQ ID NO: 9443 - RNA, 54 nt, synthetic construct
  source 1..54: mol_type = other RNA
aaaaaaaaaaaaaataaaaaaaaaaaaaaaaaaaaaaaaaaaaaaaaaaatata

SEQ ID NO: 9444 - RNA, 54 nt, synthetic construct
  source 1..54: mol_type = other RNA
aaaaaaaaaaaaaaaataaaaaaaaaaaaaaaaaaaaaaaaaaaaaaaaatata

SEQ ID NO: 9445 - RNA, 54 nt, synthetic construct
  source 1..54: mol_type = other RNA
aaaaaaaaaataaaaaaaaaaaaaaaaaaaaaaaaaaaaaaaaaaaaaaatata

SEQ ID NO: 9446 - RNA, 54 nt, synthetic construct
  source 1..54: mol_type = other RNA
aaaaaaaaaaaaaaaaaaaaaaaaaaaaaaaaaaaaaaaataaaaaaaaatata

SEQ ID NO: 9447 - RNA, 54 nt, synthetic construct
  source 1..54: mol_type = other RNA
aaaaaaaaaaaaaaaaaaaaaaaaaaaaaaaaaataaataaataaataaataat

SEQ ID NO: 9448 - RNA, 55 nt, synthetic construct
  source 1..55: mol_type = other RNA
aaaaaaaaaaaaaaaaaaaaaaaaaaaaaaaaaaaaaaaaaaaaaaaaaaatata

SEQ ID NO: 9449 - RNA, 55 nt, synthetic construct
  source 1..55: mol_type = other RNA
aaaaaaaaaaaaaaaaaaaaaaaaaaaaaaaaaaaaaaaaaaaaaaataaatata

SEQ ID NO: 9450 - RNA, 55 nt, synthetic construct
  source 1..55: mol_type = other RNA
aaaaaaaaaaaaaaaaaaaaaaaaaaaaaaaaaaaaaaaaaaaaatataaatata

SEQ ID NO: 9451 - RNA, 55 nt, synthetic construct
  source 1..55: mol_type = other RNA
aaaaaaaaaaaaaaaaaaaaaaaaaaaaaaaaaaaaaaaaataaatataaatata

SEQ ID NO: 9452 - RNA, 55 nt, synthetic construct
  source 1..55: mol_type = other RNA
aaataaaaaaaaaaaaaaaaaaaaaaaaaaaaaaaaaaaaaaaaaaaaaaatata

SEQ ID NO: 9453 - RNA, 55 nt, synthetic construct
  source 1..55: mol_type = other RNA
aaataaataaaaaaaaaaaaaaaaaaaaaaaaaaaaaaaaaaaaaaaaaaatata

SEQ ID NO: 9454 - RNA, 55 nt, synthetic construct
  source 1..55: mol_type = other RNA
aaataaaaaaaaaaaaaaaaaaaaaaaaaaaaaaaaaaaaaaaaaaataaatata

SEQ ID NO: 9455 - RNA, 55 nt, synthetic construct
  source 1..55: mol_type = other RNA
aaataaataaaaaaaaaaaaaaaaaaaaaaaaaaaaaaaaaaaaaaataaatata

SEQ ID NO: 9456 - RNA, 55 nt, synthetic construct
  source 1..55: mol_type = other RNA
aaataaaaaaaaaaaaaaaaaaaaaaaaaaaaaaaaaaaaaaataaataaatata

SEQ ID NO: 9457 - RNA, 55 nt, synthetic construct
  source 1..55: mol_type = other RNA
aaataaataaaaaaaaaaaaaaaaaaaaaaaaaaaaaaaaaaataaataaatata

SEQ ID NO: 9458 - RNA, 55 nt, synthetic construct
  source 1..55: mol_type = other RNA
aaaaaaaaaaaaaaaaaaaaaaaaaaaaaaaaaaaaaaaaaaaaaaaaatatata

SEQ ID NO: 9459 - RNA, 55 nt, synthetic construct
  source 1..55: mol_type = other RNA
aaaaaaaaaaaaaaaaaaaaaaaaaaaaaaaaaaaaaaaaaaaaaaaaaaaataa

SEQ ID NO: 9460 - RNA, 55 nt, synthetic construct
  source 1..55: mol_type = other RNA
aaaaaaaaaaaaaaaaaaaaaaaaaaaaaaaaaaaaaaaaataaataaatatata

SEQ ID NO: 9461 - RNA, 55 nt, synthetic construct
  source 1..55: mol_type = other RNA
aaaaaaaaaaaaaaaaaaaaaaaaaaaaaaaaaaaaaaaaaaaaaaaataaataa

SEQ ID NO: 9462 - RNA, 55 nt, synthetic construct
  source 1..55: mol_type = other RNA
aaaaaaaaaaaaaaaaaaaaaaaaaaaaaaaaaaaaataaataaataaatatata

SEQ ID NO: 9463 - RNA, 55 nt, synthetic construct
  source 1..55: mol_type = other RNA
aaaaaaaaaaaaaaaaaaaaaaaaaaaaaaaaaaaaaaaaaaaataaataaataa

SEQ ID NO: 9464 - RNA, 55 nt, synthetic construct
  source 1..55: mol_type = other RNA
aaaaaaaaaaaaaaaaaaaaaaaaaaaaaaaaaaaaaaaaaaaaaaaaaaataaa

SEQ ID NO: 9465 - RNA, 55 nt, synthetic construct
  source 1..55: mol_type = other RNA
aaaaaaaaaaaaaaaaaaaaaaaaaaaaaaaaaaaaaaaaaaaaaaataaataaa

SEQ ID NO: 9466 - RNA, 55 nt, synthetic construct
  source 1..55: mol_type = other RNA
aaaaaaaaaaaaaaaaaaaaaaaaaaaaaaaaaaaaaaaaaaataaataaataaa

SEQ ID NO: 9467 - RNA, 55 nt, synthetic construct
  source 1..55: mol_type = other RNA
aaaaaaaaaaaaaaaaaaaaaaaaaaaaaaaaaaaaaaataaataaataaataaa

SEQ ID NO: 9468 - RNA, 55 nt, synthetic construct
  source 1..55: mol_type = other RNA
aaaaaaaaaaaaaaaaaaaaaaaaaaaaaaaaaaataaataaataaataaataaa

SEQ ID NO: 9469 - RNA, 55 nt, synthetic construct
  source 1..55: mol_type = other RNA
aaaaaaaaaaaaaaaaaaaaaaaaaaaaaaaaaaaaaaaaaaaaaaaaaaaatat

SEQ ID NO: 9470 - RNA, 55 nt, synthetic construct
  source 1..55: mol_type = other RNA
aaaaaaaaaaaaaaaaaaaaaaaaaaaaaaaaaaaaaaaaaaaaaaaataaatat

SEQ ID NO: 9471 - RNA, 55 nt, synthetic construct
  source 1..55: mol_type = other RNA
aaaaaaaaaaaaaaaaaaaaaaaaaaaaaaaaaaaaaaaaaaaataaataaatat

SEQ ID NO: 9472 - RNA, 55 nt, synthetic construct
  source 1..55: mol_type = other RNA
aaaaaaaaaaaaaaaaaaaaaaaaaaaaaaataaataaatataaatataaatata

SEQ ID NO: 9473 - RNA, 55 nt, synthetic construct
  source 1..55: mol_type = other RNA
aaaaaaaaaaaaaaaaaaaaaaaaaaataaataaataaatataaatataaatata

SEQ ID NO: 9474 - RNA, 55 nt, synthetic construct
  source 1..55: mol_type = other RNA
aaaaaaaaaaaaaaaaaaaaaaaaaaataaataaatataaataaatataaatata

SEQ ID NO: 9475 - RNA, 55 nt, synthetic construct
  source 1..55: mol_type = other RNA
aaaaaaaaaaaaaaaaaaaaaaaaaaataaatataaataaataaatataaatata

SEQ ID NO: 9476 - RNA, 55 nt, synthetic construct
  source 1..55: mol_type = other RNA
aaaaaaaaaaaaaaaaaaaaaaataaataaataaataaatataaatataaatata

SEQ ID NO: 9477 - RNA, 55 nt, synthetic construct
  source 1..55: mol_type = other RNA
aaaaaaaaaaaaaaaaaaaaaaataaataaataaatataaataaatataaatata

SEQ ID NO: 9478 - RNA, 55 nt, synthetic construct
  source 1..55: mol_type = other RNA
aaaaaaaaaaaaaaaaaaaaaaataaataaatataaataaataaatataaatata

SEQ ID NO: 9479 - RNA, 55 nt, synthetic construct
  source 1..55: mol_type = other RNA
aaataaatataaaaaaaaaaaaaaaaaaaaaaaaaaaaaaaaaaaaaaaaatata

SEQ ID NO: 9480 - RNA, 55 nt, synthetic construct
  source 1..55: mol_type = other RNA
aaaaaaaaaaaaaaaaaaataaataaataaataaatataaataaatataaatata

SEQ ID NO: 9481 - RNA, 55 nt, synthetic construct
  source 1..55: mol_type = other RNA
aaaaaaaaaaaaaaaaaaataaataaataaataaataaatataaatataaatata

SEQ ID NO: 9482 - RNA, 55 nt, synthetic construct
  source 1..55: mol_type = other RNA
aaaaaaaaaaaaaaaaaaataaataaataaatataaataaataaatataaatata

SEQ ID NO: 9483 - RNA, 55 nt, synthetic construct
  source 1..55: mol_type = other RNA
aaataaatataaataaaaaaaaaaaaaaaaaaaaaaaaaaaaaaaaaaaaatata

SEQ ID NO: 9484 - RNA, 55 nt, synthetic construct
  source 1..55: mol_type = other RNA
aaataaatataaaaaaaaaaaaaaaaaaaaaaaaaaaaaaaaaaaaataaatata

SEQ ID NO: 9485 - RNA, 55 nt, synthetic construct
  source 1..55: mol_type = other RNA
aaataaatataaataaaaaaaaaaaaaaaaaaaaaaaaaaaaaaaaataaatata

SEQ ID NO: 9486 - RNA, 55 nt, synthetic construct
  source 1..55: mol_type = other RNA
aaataaatataaaaaaaaaaaaaaaaaaaaaaaaaaaaaaaaataaataaatata

SEQ ID NO: 9487 - RNA, 55 nt, synthetic construct
  source 1..55: mol_type = other RNA
aaatataaataaataaataaaaaaaaaaaaaaaaaaaaaaaaaaaaataaatata

SEQ ID NO: 9488 - RNA, 55 nt, synthetic construct
  source 1..55: mol_type = other RNA
aaataaatataaataaaaaaaaaaaaaaaaaaaaaaaaaaaaataaataaatata

SEQ ID NO: 9489 - RNA, 55 nt, synthetic construct
  source 1..55: mol_type = other RNA
aaaaaaaaaaaaaaaaaaaaaaaaaaaaaaaaaaaaaaaaaaaaaaaaaatataa

SEQ ID NO: 9490 - RNA, 55 nt, synthetic construct
  source 1..55: mol_type = other RNA
aaatataaataaataaataaaaaaaaaaaaaaaaaaaaaaaaataaataaatata

SEQ ID NO: 9491 - RNA, 55 nt, synthetic construct
  source 1..55: mol_type = other RNA
aaaaaaaaaaaaaaaaaaaaaaaaaaaaaaaaaaaaaaaaaaaaaatataaataa

SEQ ID NO: 9492 - RNA, 55 nt, synthetic construct
  source 1..55: mol_type = other RNA
aaaaaaaaaaaaaaaaaaaaaaaaaaaaaaaaaaaaaaaaaaaaaataaatataa

SEQ ID NO: 9493 - RNA, 55 nt, synthetic construct
  source 1..55: mol_type = other RNA
aaatataaataaataaataaaaaaaaaaaaaaaaaaaaataaataaataaatata

SEQ ID NO: 9494 - RNA, 55 nt, synthetic construct
  source 1..55: mol_type = other RNA
aaatataaataaataaataaataaaaaaaaaaaaaaaaaaaaataaataaatata

SEQ ID NO: 9495 - RNA, 55 nt, synthetic construct
  source 1..55: mol_type = other RNA
aaataaatataaataaataaaaaaaaaaaaaaaaaaaaataaataaataaatata

SEQ ID NO: 9496 - RNA, 55 nt, synthetic construct
  source 1..55: mol_type = other RNA
aaaaaaaaaaaaaaaaaaaaaaaaaaaaaaaaaaaaaaaaaataaataaatataa

SEQ ID NO: 9497 - RNA, 55 nt, synthetic construct
  source 1..55: mol_type = other RNA
aaaaaaaaaaaaaaaaaaaaaaaaaaaaaaaaaaaaaaaaaataaatataaataa

SEQ ID NO: 9498 - RNA, 55 nt, synthetic construct
  source 1..55: mol_type = other RNA
aaatataaataaataaataaaaaaaaaaaaaaaaataaataaataaataaatata

SEQ ID NO: 9499 - RNA, 55 nt, synthetic construct
  source 1..55: mol_type = other RNA
aaatataaataaataaataaataaaaaaaaaaaaaaaaataaataaataaatata

SEQ ID NO: 9500 - RNA, 55 nt, synthetic construct
  source 1..55: mol_type = other RNA
aaataaatataaataaataaataaaaaaaaaaaaaaaaataaataaataaatata

SEQ ID NO: 9501 - RNA, 55 nt, synthetic construct
  source 1..55: mol_type = other RNA
aaatataaataaataaataaataaaaaaaaaaaaataaataaataaataaatata

SEQ ID NO: 9502 - RNA, 55 nt, synthetic construct
  source 1..55: mol_type = other RNA
aaataaatataaataaataaataaaaaaaaaaaaataaataaataaataaatata

SEQ ID NO: 9503 - RNA, 55 nt, synthetic construct
  source 1..55: mol_type = other RNA
aaaaaaaaaaaaaaaaaaaaaaaaaaataaataaataaatataaataaatatata

SEQ ID NO: 9504 - RNA, 55 nt, synthetic construct
  source 1..55: mol_type = other RNA
aaaaaaaaaaaaaaaaaaaaaaaaaaataaataaatataaataaataaatatata

SEQ ID NO: 9505 - RNA, 55 nt, synthetic construct
  source 1..55: mol_type = other RNA
aaaaaaaaaaaaaaaaaaaaaaaaaaataaatataaataaataaataaatatata

SEQ ID NO: 9506 - RNA, 55 nt, synthetic construct
  source 1..55: mol_type = other RNA
aaaaaaaaaaaaaaaaaaaaaaaaaaaaaaaaaaaaaaaaaaaaatataaataaa

SEQ ID NO: 9507 - RNA, 55 nt, synthetic construct
  source 1..55: mol_type = other RNA
aaataaaaaaaaaaaaaaaaaaaaaaaaaaaaaaaaaaaaaaaaaaaaatatata

SEQ ID NO: 9508 - RNA, 55 nt, synthetic construct
  source 1..55: mol_type = other RNA
aaaaaaaaaaaaaaaaaaaaaaataaataaataaataaatataaataaatatata

SEQ ID NO: 9509 - RNA, 55 nt, synthetic construct
  source 1..55: mol_type = other RNA
aaaaaaaaaaaaaaaaaaaaaaataaataaatataaataaataaataaatatata

SEQ ID NO: 9510 - RNA, 55 nt, synthetic construct
  source 1..55: mol_type = other RNA
aaaaaaaaaaaaaaaaaaaaaaataaataaataaatataaataaataaatatata

SEQ ID NO: 9511 - RNA, 55 nt, synthetic construct
  source 1..55: mol_type = other RNA
aaaaaaaaaaaaaaaaaaaaaaaaaaaaaaaaaaaaaaaaataaataaatataaa

SEQ ID NO: 9512 - RNA, 55 nt, synthetic construct
  source 1..55: mol_type = other RNA
aaaaaaaaaaaaaaaaaaaaaaaaaaaaaaaaaaaaaaaaataaatataaataaa

SEQ ID NO: 9513 - RNA, 55 nt, synthetic construct
  source 1..55: mol_type = other RNA
aaaaaaaaaaaaaaaaaaataaataaataaataaataaatataaataaatatata

SEQ ID NO: 9514 - RNA, 55 nt, synthetic construct
  source 1..55: mol_type = other RNA
aaaaaaaaaaaaaaaaaaataaataaataaataaatataaataaataaatatata

SEQ ID NO: 9515 - RNA, 55 nt, synthetic construct
  source 1..55: mol_type = other RNA
aaataaaaaaaaaaaaaaaaaaaaaaaaaaaaaaaaaaaaaaaaaaaaaaaataa

SEQ ID NO: 9516 - RNA, 55 nt, synthetic construct
  source 1..55: mol_type = other RNA
aaaaaaaaaaaaaaaaaaaaaaaaaaaaaaaaaaaaatataaataaataaataaa

SEQ ID NO: 9517 - RNA, 55 nt, synthetic construct
  source 1..55: mol_type = other RNA
aaaaaaaaaaaaaaaaaaaaaaaaaaaaaaaaaaaaataaataaataaatataaa

SEQ ID NO: 9518 - RNA, 55 nt, synthetic construct
  source 1..55: mol_type = other RNA
aaaaaaaaaaaaaaaaaaaaaaaaaaaaaaaaaaaaataaataaatataaataaa

SEQ ID NO: 9519 - RNA, 55 nt, synthetic construct
  source 1..55: mol_type = other RNA
aaataaaaaaaaaaaaaaaaaaaaaaaaaaaaaaaaaaaaataaataaatatata

SEQ ID NO: 9520 - RNA, 55 nt, synthetic construct
  source 1..55: mol_type = other RNA
aaataaaaaaaaaaaaaaaaaaaaaaaaaaaaaaaaaaaaaaaaaaaataaataa

SEQ ID NO: 9521 - RNA, 55 nt, synthetic construct
  source 1..55: mol_type = other RNA
aaataaataaaaaaaaaaaaaaaaaaaaaaaaaaaaaaaaaaaaaaaaaaaataa

SEQ ID NO: 9522 - RNA, 55 nt, synthetic construct
  source 1..55: mol_type = other RNA
aaaaaaaaaaaaaaaaaaaaaaaaaaaaaaaaataaataaataaataaatataaa

SEQ ID NO: 9523 - RNA, 55 nt, synthetic construct
  source 1..55: mol_type = other RNA
aaaaaaaaaaaaaaaaaaaaaaaaaaaaaaaaataaataaataaatataaataaa

SEQ ID NO: 9524 - RNA, 55 nt, synthetic construct
  source 1..55: mol_type = other RNA
aaaaaaaaaaaaaaaaaaaaaaaaaaaaaaaaaaaaaaaaaaaaaaatatatata

SEQ ID NO: 9525 - RNA, 55 nt, synthetic construct
  source 1..55: mol_type = other RNA
aaataaataaaaaaaaaaaaaaaaaaaaaaaaaaaaaaaaaaaaaaaataaataa

SEQ ID NO: 9526 - RNA, 55 nt, synthetic construct
  source 1..55: mol_type = other RNA
aaaaaaaaaaaaaaaaaaaaaaaaaaaaataaataaataaataaataaatataaa

SEQ ID NO: 9527 - RNA, 55 nt, synthetic construct
  source 1..55: mol_type = other RNA
aaaaaaaaaaaaaaaaaaaaaaaaaaaaataaataaataaataaatataaataaa

SEQ ID NO: 9528 - RNA, 55 nt, synthetic construct
  source 1..55: mol_type = other RNA
aaaaaaaaaaaaaaaaaaaaaaaaataaataaataaataaataaatataaataaa

SEQ ID NO: 9529 - RNA, 55 nt, synthetic construct
  source 1..55: mol_type = other RNA
aaaaaaaaaaaaaaaaaaaaaaaaataaataaataaataaataaataaatataaa

SEQ ID NO: 9530 - RNA, 55 nt, synthetic construct
  source 1..55: mol_type = other RNA
aaaaaaaaaaaaaataaataaataaataaataaatataaataaataaataaataa

SEQ ID NO: 9531 - RNA, 55 nt, synthetic construct
  source 1..55: mol_type = other RNA
aaaaaaaaaaaaaataaataaataaataaatataaataaataaataaataaataa

SEQ ID NO: 9532 - RNA, 55 nt, synthetic construct
  source 1..55: mol_type = other RNA
aaaaaaaaaaaaaataaataaataaatataaataaataaataaataaataaataa

SEQ ID NO: 9533 - RNA, 55 nt, synthetic construct
  source 1..55: mol_type = other RNA
aaaaaaaaaaaaaaaaaaaaataaataaataaataaataaataaataaatataaa

SEQ ID NO: 9534 - RNA, 55 nt, synthetic construct
  source 1..55: mol_type = other RNA
aaaaaaaaaaaaaaaaaaaaataaataaataaataaataaataaatataaataaa

SEQ ID NO: 9535 - RNA, 55 nt, synthetic construct
  source 1..55: mol_type = other RNA
aaaaaaaaaataaataaataaataaataaatataaataaataaataaataaataa

SEQ ID NO: 9536 - RNA, 55 nt, synthetic construct
  source 1..55: mol_type = other RNA
aaaaaaaaaataaataaataaataaataaataaatataaataaataaataaataa

SEQ ID NO: 9537 - RNA, 55 nt, synthetic construct
  source 1..55: mol_type = other RNA
aaaaaaaaaataaataaataaataaatataaataaataaataaataaataaataa

SEQ ID NO: 9538 - RNA, 55 nt, synthetic construct
  source 1..55: mol_type = other RNA
aaataaataaaaaaaaaaaaaaaaaaaaaaaaaaaaaaaaaaaaaaataaataaa

SEQ ID NO: 9539 - RNA, 55 nt, synthetic construct
  source 1..55: mol_type = other RNA
aaaaaaaaaaaaaaaaataaataaataaataaataaataaataaataaatataaa

SEQ ID NO: 9540 - RNA, 55 nt, synthetic construct
  source 1..55: mol_type = other RNA
aaaaaaaaaaaaaaaaataaataaataaataaataaataaataaatataaataaa

SEQ ID NO: 9541 - RNA, 55 nt, synthetic construct
  source 1..55: mol_type = other RNA
aaataaataaaaaaaaaaaaaaaaaaaaaaaaaaaaaaaaaaataaataaataaa

SEQ ID NO: 9542 - RNA, 55 nt, synthetic construct
  source 1..55: mol_type = other RNA
aaataaataaataaataaataaataaataaataaaaaaaaaaaaaaaaaaaataa

SEQ ID NO: 9543 - RNA, 55 nt, synthetic construct
  source 1..55: mol_type = other RNA
aaataaataaataaataaataaataaataaataaaaaaaaaaaaaaaataaataa

SEQ ID NO: 9544 - RNA, 55 nt, synthetic construct
  source 1..55: mol_type = other RNA
aaataaataaataaataaataaataaataaataaataaaaaaaaaaaaaaaataa

SEQ ID NO: 9545 - RNA, 55 nt, synthetic construct
  source 1..55: mol_type = other RNA
aaataaataaataaataaataaataaataaataaataaataaaaaaaaaaaataa

SEQ ID NO: 9546 - RNA, 55 nt, synthetic construct
  source 1..55: mol_type = other RNA
aaataaataaataaataaataaataaataaataaaaaaaaaaaataaataaataa

SEQ ID NO: 9547 - RNA, 55 nt, synthetic construct
  source 1..55: mol_type = other RNA
aaataaataaataaataaataaataaataaataaataaaaaaaaaaaataaataa

SEQ ID NO: 9548 - RNA, 56 nt, synthetic construct
  source 1..56: mol_type = other RNA
aaaaaaaaaaaaaaaaaaaaaaaaaaaaaaaaaaaaaaaaaaaaaaaaaaaatata

SEQ ID NO: 9549 - RNA, 56 nt, synthetic construct
  source 1..56: mol_type = other RNA
aaaaaaaaaaaaaaaaaaaaaaaaaaaaaaaaaaaataaataaataaataaatata

SEQ ID NO: 9550 - RNA, 56 nt, synthetic construct
  source 1..56: mol_type = other RNA
aaaaaaaaaaaaaaaaaaaaaaaaaaaaaaaataaataaataaataaataaatata

SEQ ID NO: 9551 - RNA, 56 nt, synthetic construct
  source 1..56: mol_type = other RNA
aaaaaaaaaaaaaaaaaaaaaaaaaaaaaaaaaatataaataaataaataaatata

SEQ ID NO: 9552 - RNA, 56 nt, synthetic construct
  source 1..56: mol_type = other RNA
aaaaaaaaaaaaaaaaaaaaaaaaaaaaaataaatataaataaataaataaatata

SEQ ID NO: 9553 - RNA, 56 nt, synthetic construct
  source 1..56: mol_type = other RNA
aaaaaaaaaaaaaaaaaaaaaaaaaaaaaatataaataaataaataaataaatata

SEQ ID NO: 9554 - RNA, 56 nt, synthetic construct
  source 1..56: mol_type = other RNA
aaaaaaaaaaaaaaaaaaaaaaaaaaaaaataaataaataaatataaataaatata

SEQ ID NO: 9555 - RNA, 56 nt, synthetic construct
  source 1..56: mol_type = other RNA
aaaaaaaaaaaaaaaaaaaaaaaaaataaataaatataaataaataaataaatata

SEQ ID NO: 9556 - RNA, 56 nt, synthetic construct
  source 1..56: mol_type = other RNA
aaaaaaaaaaaaaaaaaaaaaaaaaataaatataaataaataaataaataaatata

SEQ ID NO: 9557 - RNA, 56 nt, synthetic construct
  source 1..56: mol_type = other RNA
aaaaaaaaaaaaaaaaaaaaaaaaaataaataaataaataaatataaataaatata

SEQ ID NO: 9558 - RNA, 56 nt, synthetic construct
  source 1..56: mol_type = other RNA
aaaaaaaaaaaaaaaaaaaaaaaaaataaataaataaataaataaatataaatata

SEQ ID NO: 9559 - RNA, 56 nt, synthetic construct
  source 1..56: mol_type = other RNA
aaaaaaaaaaaaaaaaaaaaaataaataaataaataaataaatataaataaatata

SEQ ID NO: 9560 - RNA, 56 nt, synthetic construct
  source 1..56: mol_type = other RNA
aaaaaaaaaaaaaaaaaaaaaataaataaataaataaataaataaatataaatata

SEQ ID NO: 9561 - RNA, 56 nt, synthetic construct
  source 1..56: mol_type = other RNA
aaaaaaaaaaaaaaaaaaaaaaaaaaaaaaaaaaaaaaaaaaaaaaaaaatatata

SEQ ID NO: 9562 - RNA, 56 nt, synthetic construct
  source 1..56: mol_type = other RNA
aaataaataaataaataaaaaaaaaaaaaaaaaaaaaaaaaaaaaaaaaaaatata

SEQ ID NO: 9563 - RNA, 56 nt, synthetic construct
  source 1..56: mol_type = other RNA
aaataaataaataaataaataaaaaaaaaaaaaaaaaaaaaaaaaaaaaaaatata

SEQ ID NO: 9564 - RNA, 56 nt, synthetic construct
  source 1..56: mol_type = other RNA
aaataaataaataaataaaaaaaaaaaaaaaaaaaaaaaaaaaaaaaataaatata

SEQ ID NO: 9565 - RNA, 56 nt, synthetic construct
  source 1..56: mol_type = other RNA
aaaaaaaaaaaaaaaaaaaaaaaaaaaaaaaaaaaaaaaaaaaaaataaatatata

SEQ ID NO: 9566 - RNA, 56 nt, synthetic construct
  source 1..56: mol_type = other RNA
aaaaaaaaaaaaaaaaaaaaaaaaaaaaaaaaaaaaaaaaaaaaaaaaaaaaataa

SEQ ID NO: 9567 - RNA, 56 nt, synthetic construct
  source 1..56: mol_type = other RNA
aaataaaaaaaaaaaaaaaaaaaaaaaaaaaataaataaataaataaataaatata

SEQ ID NO: 9568 - RNA, 56 nt, synthetic construct
  source 1..56: mol_type = other RNA
aaataaataaataaataaataaataaaaaaaaaaaaaaaaaaaaaaaaaaaatata

SEQ ID NO: 9569 - RNA, 56 nt, synthetic construct
  source 1..56: mol_type = other RNA
aaataaataaataaataaataaaaaaaaaaaaaaaaaaaaaaaaaaaataaatata

SEQ ID NO: 9570 - RNA, 56 nt, synthetic construct
  source 1..56: mol_type = other RNA
aaaaaaaaaaaaaaaaaaaaaaaaaaaaaaaaaaaaaaaaaataaataaatatata

SEQ ID NO: 9571 - RNA, 56 nt, synthetic construct
  source 1..56: mol_type = other RNA
aaaaaaaaaaaaaaaaaaaaaaaaaaaaaaaaaaaaaaaaaaaaaaaaataaataa

SEQ ID NO: 9572 - RNA, 56 nt, synthetic construct
  source 1..56: mol_type = other RNA
aaataaataaataaataaataaataaataaaaaaaaaaaaaaaaaaaaaaaatata

SEQ ID NO: 9573 - RNA, 56 nt, synthetic construct
  source 1..56: mol_type = other RNA
aaataaataaataaataaataaataaaaaaaaaaaaaaaaaaaaaaaataaatata

SEQ ID NO: 9574 - RNA, 56 nt, synthetic construct
  source 1..56: mol_type = other RNA
aaaaaaaaaaaaaaaaaaaaaaaaaaaaaaaaaaaaaataaataaataaatatata

SEQ ID NO: 9575 - RNA, 56 nt, synthetic construct
  source 1..56: mol_type = other RNA
aaataaataaataaataaataaataaataaataaaaaaaaaaaaaaaaaaaatata

SEQ ID NO: 9576 - RNA, 56 nt, synthetic construct
  source 1..56: mol_type = other RNA
aaataaataaataaataaataaataaataaaaaaaaaaaaaaaaaaaataaatata

SEQ ID NO: 9577 - RNA, 56 nt, synthetic construct
  source 1..56: mol_type = other RNA
aaaaaaaaaaaaaaaaaaaaaaaaaaaaaaaaaataaataaataaataaatatata

SEQ ID NO: 9578 - RNA, 56 nt, synthetic construct
  source 1..56: mol_type = other RNA
aaaaaaaaaaaaaaaaaaaaaaaaaaaaaaaaaaaaaaaaaaaaaaaaaaaataaa

SEQ ID NO: 9579 - RNA, 56 nt, synthetic construct
  source 1..56: mol_type = other RNA
aaaaaaaaaaaaaaaaaaaaaaaaaaaaaaaaaaaaaaaaataaataaataaataa

SEQ ID NO: 9580 - RNA, 56 nt, synthetic construct
  source 1..56: mol_type = other RNA
aaataaataaataaataaataaataaataaataaataaaaaaaaaaaaaaaatata

SEQ ID NO: 9581 - RNA, 56 nt, synthetic construct
  source 1..56: mol_type = other RNA
aaaaaaaaaaaaaaaaaaaaaaaaaaaaaaaaaaaaataaataaataaataaataa

SEQ ID NO: 9582 - RNA, 56 nt, synthetic construct
  source 1..56: mol_type = other RNA
aaaaaaaaaaaaaaaaaaaaaaaaaataaataaataaataaataaataaatatata

SEQ ID NO: 9583 - RNA, 56 nt, synthetic construct
  source 1..56: mol_type = other RNA
aaaaaaaaaaaaaaaaaaaaaaaaaaaaaaaaataaataaataaataaataaataa

SEQ ID NO: 9584 - RNA, 56 nt, synthetic construct
  source 1..56: mol_type = other RNA
aaataaataaataaataaataaataaataaataaataaataaataaaaaaaatata

SEQ ID NO: 9585 - RNA, 56 nt, synthetic construct
  source 1..56: mol_type = other RNA
aaaaaaaaaaaaaaaaaaaaaataaataaataaataaataaataaataaatatata

SEQ ID NO: 9586 - RNA, 56 nt, synthetic construct
  source 1..56: mol_type = other RNA
aaaaaaaaaaaaaaaaaaaaaaaaaaaaaaaaaaaaaaaaaaaaaaaaaaaaatat

SEQ ID NO: 9587 - RNA, 56 nt, synthetic construct
  source 1..56: mol_type = other RNA
aaaaaaaaaaaaaaaaaaaaaaaaaaaaaaaaaaaaaaaaaaaaaaaaataaatat

SEQ ID NO: 9588 - RNA, 56 nt, synthetic construct
  source 1..56: mol_type = other RNA
aaaaaaaaaaaaaaaaaaaaaaaaaaaaaaaaaaaaaaaaaaaaataaataaatat

SEQ ID NO: 9589 - RNA, 56 nt, synthetic construct
  source 1..56: mol_type = other RNA
aaaaaaaaaaaaaaaaaaaaaaaaaaaaaaaaaaaaaaaaataaataaataaatat

SEQ ID NO: 9590 - RNA, 56 nt, synthetic construct
  source 1..56: mol_type = other RNA
aaaaaaaaaaaaaaaaaaaaaaaaaaaaaaaaaaaaataaataaataaataaatat

SEQ ID NO: 9591 - RNA, 56 nt, synthetic construct
  source 1..56: mol_type = other RNA
aaaaaaaaaaaaaaaaaaaaaaaaaaaaaaaaataaataaataaataaataaatat

SEQ ID NO: 9592 - RNA, 56 nt, synthetic construct
  source 1..56: mol_type = other RNA
aaaaaaaaaaaaaaaaaaaaaaaaaaaaaaaaaaaaaaaaaaaaaaaaaaaaaata

SEQ ID NO: 9593 - RNA, 56 nt, synthetic construct
  source 1..56: mol_type = other RNA
aaatataaaaaaaaaaaaaaaaaaaaaaaaaaaaaaaaaaaaaaaaaaaaaatata

SEQ ID NO: 9594 - RNA, 56 nt, synthetic construct
  source 1..56: mol_type = other RNA
aaaaaaaaaaaaaaaaaaaaaaaatataaataaatataaataaataaataaatata

SEQ ID NO: 9595 - RNA, 56 nt, synthetic construct
  source 1..56: mol_type = other RNA
aaaaaaaaaaaaaaaaaaaaaaaatataaatataaataaataaataaataaatata

SEQ ID NO: 9596 - RNA, 56 nt, synthetic construct
  source 1..56: mol_type = other RNA
aaataaaaaaaaaaaaaaaaaaaaaaaaaaaaaaaaaaaaaaaaaatataaatata

SEQ ID NO: 9597 - RNA, 56 nt, synthetic construct
  source 1..56: mol_type = other RNA
aaaaaaaaaaaaaaaaaaaataaatataaataaatataaataaataaataaatata

SEQ ID NO: 9598 - RNA, 56 nt, synthetic construct
  source 1..56: mol_type = other RNA
aaaaaaaaaaaaaaaaaaaataaatataaatataaataaataaataaataaatata

SEQ ID NO: 9599 - RNA, 56 nt, synthetic construct
  source 1..56: mol_type = other RNA
aaaaaaaaaaaaaaaaaaaatataaataaataaataaataaatataaataaatata

SEQ ID NO: 9600 - RNA, 56 nt, synthetic construct
  source 1..56: mol_type = other RNA
aaaaaaaaaaaaaaaaaaaatataaataaataaataaataaataaatataaatata

SEQ ID NO: 9601 - RNA, 56 nt, synthetic construct
  source 1..56: mol_type = other RNA
aaataaataaatataaaaaaaaaaaaaaaaaaaaaaaaaaaaaaaaaaaaaatata

SEQ ID NO: 9602 - RNA, 56 nt, synthetic construct
  source 1..56: mol_type = other RNA
aaataaaaaaaaaaaaaaaaaaaaaaaaaaaaaaaaaaaaaataaatataaatata

SEQ ID NO: 9603 - RNA, 56 nt, synthetic construct
  source 1..56: mol_type = other RNA
aaaaaaaaaaaaaaaataaataaatataaataaatataaataaataaataaatata

SEQ ID NO: 9604 - RNA, 56 nt, synthetic construct
  source 1..56: mol_type = other RNA
aaaaaaaaaaaaaaaataaataaatataaatataaataaataaataaataaatata

SEQ ID NO: 9605 - RNA, 56 nt, synthetic construct
  source 1..56: mol_type = other RNA
aaatataaataaaaaaaaaaaaaaaaaaaaaaaaaaaaaaaaaataaataaatata

SEQ ID NO: 9606 - RNA, 56 nt, synthetic construct
  source 1..56: mol_type = other RNA
aaataaataaatataaaaaaaaaaaaaaaaaaaaaaaaaaaaaaaaaataaatata

SEQ ID NO: 9607 - RNA, 56 nt, synthetic construct
  source 1..56: mol_type = other RNA
aaataaataaataaatataaaaaaaaaaaaaaaaaaaaaaaaaaaaaaaaaatata

SEQ ID NO: 9608 - RNA, 56 nt, synthetic construct
  source 1..56: mol_type = other RNA
aaaaaaaaaaaataaataaataaatataaataaatataaataaataaataaatata

SEQ ID NO: 9609 - RNA, 56 nt, synthetic construct
  source 1..56: mol_type = other RNA
aaaaaaaaaaaataaataaataaatataaatataaataaataaataaataaatata

SEQ ID NO: 9610 - RNA, 56 nt, synthetic construct
  source 1..56: mol_type = other RNA
aaatataaataaaaaaaaaaaaaaaaaaaaaaaaaaaaaataaataaataaatata

SEQ ID NO: 9611 - RNA, 56 nt, synthetic construct
  source 1..56: mol_type = other RNA
aaataaataaataaataaatataaaaaaaaaaaaaaaaaaaaaaaaaaaaaatata

SEQ ID NO: 9612 - RNA, 56 nt, synthetic construct
  source 1..56: mol_type = other RNA
aaataaataaataaatataaaaaaaaaaaaaaaaaaaaaaaaaaaaaataaatata

SEQ ID NO: 9613 - RNA, 56 nt, synthetic construct
  source 1..56: mol_type = other RNA
aaataaataaataaataaaaaaaaaaaaaaaaaaaaaaaaaaaaaatataaatata

SEQ ID NO: 9614 - RNA, 56 nt, synthetic construct
  source 1..56: mol_type = other RNA
aaataaataaataaatataaataaaaaaaaaaaaaaaaaaaaaaaaaaaaaatata

SEQ ID NO: 9615 - RNA, 56 nt, synthetic construct
  source 1..56: mol_type = other RNA
aaaaaaaaaaaaaaaaaaaaaaaaaaaaaaaaaaaaaaaaaaaatataaatatata

SEQ ID NO: 9616 - RNA, 56 nt, synthetic construct
  source 1..56: mol_type = other RNA
aaaaaaaaaaaaaaaaaaaaaaaaaaaaaaaaaaaaaaaaaaaaaaaaaaatataa

SEQ ID NO: 9617 - RNA, 56 nt, synthetic construct
  source 1..56: mol_type = other RNA
aaataaaaaaaaaaaaaaaaaaaaaaaaaatataaataaataaataaataaatata

SEQ ID NO: 9618 - RNA, 56 nt, synthetic construct
  source 1..56: mol_type = other RNA
aaataaataaataaataaataaatataaaaaaaaaaaaaaaaaaaaaaaaaatata

SEQ ID NO: 9619 - RNA, 56 nt, synthetic construct
  source 1..56: mol_type = other RNA
aaataaataaataaataaatataaaaaaaaaaaaaaaaaaaaaaaaaataaatata

SEQ ID NO: 9620 - RNA, 56 nt, synthetic construct
  source 1..56: mol_type = other RNA
aaataaataaataaataaatataaataaaaaaaaaaaaaaaaaaaaaaaaaatata

SEQ ID NO: 9621 - RNA, 56 nt, synthetic construct
  source 1..56: mol_type = other RNA
aaataaataaataaataaaaaaaaaaaaaaaaaaaaaaaaaataaatataaatata

SEQ ID NO: 9622 - RNA, 56 nt, synthetic construct
  source 1..56: mol_type = other RNA
aaataaataaataaatataaataaataaaaaaaaaaaaaaaaaaaaaaaaaatata

SEQ ID NO: 9623 - RNA, 56 nt, synthetic construct
  source 1..56: mol_type = other RNA
aaataaataaataaatataaataaaaaaaaaaaaaaaaaaaaaaaaaataaatata

SEQ ID NO: 9624 - RNA, 56 nt, synthetic construct
  source 1..56: mol_type = other RNA
aaaaaaaaaaaaaaaaaaaaaaaaaaaaaaaaaaaaaaaatataaataaatatata

SEQ ID NO: 9625 - RNA, 56 nt, synthetic construct
  source 1..56: mol_type = other RNA
aaaaaaaaaaaaaaaaaaaaaaaaaaaaaaaaaaaaaaaaaaaaaaataaatataa

SEQ ID NO: 9626 - RNA, 56 nt, synthetic construct
  source 1..56: mol_type = other RNA
aaaaaaaaaaaaaaaaaaaaaaaaaaaaaaaaaaaaaaaaaaaaaaatataaataa

SEQ ID NO: 9627 - RNA, 56 nt, synthetic construct
  source 1..56: mol_type = other RNA
aaataaaaaaaaaaaaaaaaaaaaaataaatataaataaataaataaataaatata

SEQ ID NO: 9628 - RNA, 56 nt, synthetic construct
  source 1..56: mol_type = other RNA
aaataaaaaaaaaaaaaaaaaaaaaataaataaatataaataaataaataaatata

SEQ ID NO: 9629 - RNA, 56 nt, synthetic construct
  source 1..56: mol_type = other RNA
aaataaataaataaataaataaataaatataaaaaaaaaaaaaaaaaaaaaatata

SEQ ID NO: 9630 - RNA, 56 nt, synthetic construct
  source 1..56: mol_type = other RNA
aaataaataaataaataaataaatataaaaaaaaaaaaaaaaaaaaaataaatata

SEQ ID NO: 9631 - RNA, 56 nt, synthetic construct
  source 1..56: mol_type = other RNA
aaataaataaataaataaatataaataaaaaaaaaaaaaaaaaaaaaataaatata

SEQ ID NO: 9632 - RNA, 56 nt, synthetic construct
  source 1..56: mol_type = other RNA
aaataaataaataaataaatataaataaataaaaaaaaaaaaaaaaaaaaaatata

SEQ ID NO: 9633 - RNA, 56 nt, synthetic construct
  source 1..56: mol_type = other RNA
aaataaataaataaatataaataaataaataaaaaaaaaaaaaaaaaaaaaatata

SEQ ID NO: 9634 - RNA, 56 nt, synthetic construct
  source 1..56: mol_type = other RNA
aaataaataaataaatataaataaataaaaaaaaaaaaaaaaaaaaaataaatata

SEQ ID NO: 9635 - RNA, 56 nt, synthetic construct
  source 1..56: mol_type = other RNA
aaataaataaataaataaataaatataaataaaaaaaaaaaaaaaaaaaaaatata

SEQ ID NO: 9636 - RNA, 56 nt, synthetic construct
  source 1..56: mol_type = other RNA
aaaaaaaaaaaaaaaaaaaaaaaaaaaaaaaaaaaaaaaaaaataaataaatataa

SEQ ID NO: 9637 - RNA, 56 nt, synthetic construct
  source 1..56: mol_type = other RNA
aaaaaaaaaaaaaaaaaaaaaaaaaaaaaaaaaaaaaaaaaaataaatataaataa

SEQ ID NO: 9638 - RNA, 56 nt, synthetic construct
  source 1..56: mol_type = other RNA
aaataaataaataaataaataaataaataaatataaaaaaaaaaaaaaaaaatata

SEQ ID NO: 9639 - RNA, 56 nt, synthetic construct
  source 1..56: mol_type = other RNA
aaataaataaataaataaataaataaatataaataaaaaaaaaaaaaaaaaatata

SEQ ID NO: 9640 - RNA, 56 nt, synthetic construct
  source 1..56: mol_type = other RNA
aaataaaaaaaaaaaaaaaaaataaataaataaataaataaatataaataaatata

SEQ ID NO: 9641 - RNA, 56 nt, synthetic construct
  source 1..56: mol_type = other RNA
aaataaataaataaataaatataaataaataaaaaaaaaaaaaaaaaataaatata

SEQ ID NO: 9642 - RNA, 56 nt, synthetic construct
  source 1..56: mol_type = other RNA
aaataaataaataaataaataaatataaataaaaaaaaaaaaaaaaaataaatata

SEQ ID NO: 9643 - RNA, 56 nt, synthetic construct
  source 1..56: mol_type = other RNA
aaataaataaataaatataaataaataaataaaaaaaaaaaaaaaaaataaatata

SEQ ID NO: 9644 - RNA, 56 nt, synthetic construct
  source 1..56: mol_type = other RNA
aaataaataaataaataaataaataaatataaaaaaaaaaaaaaaaaataaatata

SEQ ID NO: 9645 - RNA, 56 nt, synthetic construct
  source 1..56: mol_type = other RNA
aaataaataaataaatataaataaataaataaataaaaaaaaaaaaaaaaaatata

SEQ ID NO: 9646 - RNA, 56 nt, synthetic construct
  source 1..56: mol_type = other RNA
aaataaataaataaataaataaataaaaaaaaaaaaaaaaaataaatataaatata

SEQ ID NO: 9647 - RNA, 56 nt, synthetic construct
  source 1..56: mol_type = other RNA
aaataaataaataaataaataaataaataaaaaaaaaaaaaaaaaatataaatata

SEQ ID NO: 9648 - RNA, 56 nt, synthetic construct
  source 1..56: mol_type = other RNA
aaataaataaataaataaataaatataaataaataaaaaaaaaaaaaaaaaatata

SEQ ID NO: 9649 - RNA, 56 nt, synthetic construct
  source 1..56: mol_type = other RNA
aaataaataaataaataaatataaataaataaataaaaaaaaaaaaaaaaaatata

SEQ ID NO: 9650 - RNA, 57 nt, synthetic construct
  source 1..57: mol_type = other RNA
aaaaaaaaaaaaaaaaaaaaaaaaaaaaaaaaaaaaaaaaaaaaaaaaaaaaatata

SEQ ID NO: 9651 - RNA, 57 nt, synthetic construct
  source 1..57: mol_type = other RNA
aaaaaaaaaaaaaaaaaaaaaaaaaaaaaaaaaaaaaaaaaaaaaaaaataaatata

SEQ ID NO: 9652 - RNA, 57 nt, synthetic construct
  source 1..57: mol_type = other RNA
aaaaaaaaaaaaaaaaaaaaaaaaataaataaataaataaataaataaataaatata

SEQ ID NO: 9653 - RNA, 57 nt, synthetic construct
  source 1..57: mol_type = other RNA
aaataaaaaaaaaaaaaaaaaaaaaaaaaaaaaaaaaaaaaaaaaaaaaaaaatata

SEQ ID NO: 9654 - RNA, 57 nt, synthetic construct
  source 1..57: mol_type = other RNA
aaataaataaaaaaaaaaaaaaaaaaaaaaaaaaaaaaaaaaaaaaaaaaaaatata

SEQ ID NO: 9655 - RNA, 57 nt, synthetic construct
  source 1..57: mol_type = other RNA
aaaaaaaaaaaaaaaaaaaaaaataaataaataaataaatataaataaataaatata

SEQ ID NO: 9656 - RNA, 57 nt, synthetic construct
  source 1..57: mol_type = other RNA
aaataaataaataaaaaaaaaaaaaaaaaaaaaaaaaaaaaaaaaaaaaaaaatata

SEQ ID NO: 9657 - RNA, 57 nt, synthetic construct
  source 1..57: mol_type = other RNA
aaaaaaaaaaaaaaaaaaataaataaataaataaataaatataaataaataaatata

SEQ ID NO: 9658 - RNA, 57 nt, synthetic construct
  source 1..57: mol_type = other RNA
aaataaataaataaaaaaaaaaaaaaaaaaaaaaaaaaaaaaaaaaaaataaatata

SEQ ID NO: 9659 - RNA, 57 nt, synthetic construct
  source 1..57: mol_type = other RNA
aaaaaaaaaaaaaaaaaaaaaaaaaaaaaaaaaaaaaaaaaaaaaaaaaaatatata

SEQ ID NO: 9660 - RNA, 57 nt, synthetic construct
  source 1..57: mol_type = other RNA
aaaaaaaaaaaaaaaaaaaaaaaaaaaaaaaaaaaaaaaaaaaaaaaaaaaaaataa

SEQ ID NO: 9661 - RNA, 57 nt, synthetic construct
  source 1..57: mol_type = other RNA
aaaaaaaaaaaaaaaaaaaaaaaaaaaaaaaaaaaaaaaaaaaaaaaaaaaaataaa

SEQ ID NO: 9662 - RNA, 57 nt, synthetic construct
  source 1..57: mol_type = other RNA
aaaaaaaaaaaaaaaaaaaaaaaaaaaaaaaaaaaaaaaaaaaaaaaaaaaaaatat

SEQ ID NO: 9663 - RNA, 57 nt, synthetic construct
  source 1..57: mol_type = other RNA
aaaaaaaaaaaaaaaaataaataaataaataaataaataaataaataaataaataaa

SEQ ID NO: 9664 - RNA, 57 nt, synthetic construct
  source 1..57: mol_type = other RNA
aaatataaatataaataaataaataaataaataaataaataaatataaataaatata

SEQ ID NO: 9665 - RNA, 57 nt, synthetic construct
  source 1..57: mol_type = other RNA
aaaaaaaaaaaaataaataaataaataaataaataaataaataaataaataaataaa

SEQ ID NO: 9666 - RNA, 57 nt, synthetic construct
  source 1..57: mol_type = other RNA
aaaaaaaaataaataaataaataaataaataaataaataaataaataaataaataaa

SEQ ID NO: 9667 - RNA, 57 nt, synthetic construct
  source 1..57: mol_type = other RNA
aaaaataaataaataaataaataaataaataaataaataaataaataaataaataaa

SEQ ID NO: 9668 - RNA, 57 nt, synthetic construct
  source 1..57: mol_type = other RNA
aaaaaaaaaaaaaaaaaaaaaaaaaaaaaaaaaaaaaaaaaaaaaaaaaaaaaaata

SEQ ID NO: 9669 - RNA, 57 nt, synthetic construct
  source 1..57: mol_type = other RNA
aaaaaaaaaaaaaaaaaaaaaaaaaaaaaaaaaaaaaaaaaaaaaaaaaaataaata

SEQ ID NO: 9670 - RNA, 57 nt, synthetic construct
  source 1..57: mol_type = other RNA
aaataaatataaaaaaaaaaaaaaaaaaaaaaaaaaaaaaaaaaaaaaaaaaatata

SEQ ID NO: 9671 - RNA, 57 nt, synthetic construct
  source 1..57: mol_type = other RNA
aaataaatataaataaaaaaaaaaaaaaaaaaaaaaaaaaaaaaaaaaaaaaatata

SEQ ID NO: 9672 - RNA, 57 nt, synthetic construct
  source 1..57: mol_type = other RNA
aaataaataaatataaaaaaaaaaaaaaaaaaaaaaaaaaaaaaaaaaaaaaatata

SEQ ID NO: 9673 - RNA, 57 nt, synthetic construct
  source 1..57: mol_type = other RNA
aaataaatataaataaataaaaaaaaaaaaaaaaaaaaaaaaaaaaaaaaaaatata

SEQ ID NO: 9674 - RNA, 57 nt, synthetic construct
  source 1..57: mol_type = other RNA
aaatataaataaataaataaaaaaaaaaaaaaaaaaaaaaaaaaaaaaaaaaatata

SEQ ID NO: 9675 - RNA, 57 nt, synthetic construct
  source 1..57: mol_type = other RNA
aaataaataaataaatataaaaaaaaaaaaaaaaaaaaaaaaaaaaaaaaaaatata

SEQ ID NO: 9676 - RNA, 57 nt, synthetic construct
  source 1..57: mol_type = other RNA
aaataaataaatataaataaaaaaaaaaaaaaaaaaaaaaaaaaaaaaaaaaatata

SEQ ID NO: 9677 - RNA, 57 nt, synthetic construct
  source 1..57: mol_type = other RNA
aaatataaataaataaataaataaaaaaaaaaaaaaaaaaaaaaaaaaaaaaatata

SEQ ID NO: 9678 - RNA, 57 nt, synthetic construct
  source 1..57: mol_type = other RNA
aaaaaaaaatataaatataaataaataaataaataaataaataaataaataaatata

SEQ ID NO: 9679 - RNA, 57 nt, synthetic construct
  source 1..57: mol_type = other RNA
aaaaaaaaaaaaaaaaaaaaaaaaaaaaaaaaaaaaaaaaaaaaaaaaaaaatataa

SEQ ID NO: 9680 - RNA, 57 nt, synthetic construct
  source 1..57: mol_type = other RNA
aaatataaataaataaataaataaaaaaaaaaaaaaaaaaaaaaaaaaataaatata

SEQ ID NO: 9681 - RNA, 57 nt, synthetic construct
  source 1..57: mol_type = other RNA
aaatataaataaataaataaataaataaaaaaaaaaaaaaaaaaaaaaaaaaatata

SEQ ID NO: 9682 - RNA, 57 nt, synthetic construct
  source 1..57: mol_type = other RNA
aaaaataaatataaatataaataaataaataaataaataaataaataaataaatata

SEQ ID NO: 9683 - RNA, 57 nt, synthetic construct
  source 1..57: mol_type = other RNA
aaatataaataaataaataaataaaaaaaaaaaaaaaaaaaaaaataaataaatata

SEQ ID NO: 9684 - RNA, 57 nt, synthetic construct
  source 1..57: mol_type = other RNA
aaatataaataaataaataaataaataaaaaaaaaaaaaaaaaaaaaaataaatata

SEQ ID NO: 9685 - RNA, 57 nt, synthetic construct
  source 1..57: mol_type = other RNA
aaatataaataaataaataaataaaaaaaaaaaaaaaaaaataaataaataaatata

SEQ ID NO: 9686 - RNA, 57 nt, synthetic construct
  source 1..57: mol_type = other RNA
aaatataaataaataaataaataaataaaaaaaaaaaaaaaaaaataaataaatata

SEQ ID NO: 9687 - RNA, 57 nt, synthetic construct
  source 1..57: mol_type = other RNA
aaaaaaaaaaaaaaaaaaaaaaaaaaaaaaaaaaaaaaaaaaaaaaaaaaatataaa

SEQ ID NO: 9688 - RNA, 57 nt, synthetic construct
  source 1..57: mol_type = other RNA
aaatataaataaataaataaataaaaaaaaaaaaaaataaataaataaataaatata

SEQ ID NO: 9689 - RNA, 57 nt, synthetic construct
  source 1..57: mol_type = other RNA
aaataaaaaaaaaaaaaaaaaaaaaaaaaaaaaaaaaaaaaaaaaaaaaaatatata

SEQ ID NO: 9690 - RNA, 57 nt, synthetic construct
  source 1..57: mol_type = other RNA
aaaaaaaaaaaaaaaaaaaaaaaaaaaaaaaaaaaataaatataaataaataaataa

SEQ ID NO: 9691 - RNA, 57 nt, synthetic construct
  source 1..57: mol_type = other RNA
aaatataaataaataaataaataaaaaaaaaaataaataaataaataaataaatata

SEQ ID NO: 9692 - RNA, 57 nt, synthetic construct
  source 1..57: mol_type = other RNA
aaatataaataaataaataaataaataaaaaaaaaaataaataaataaataaatata

SEQ ID NO: 9693 - RNA, 57 nt, synthetic construct
  source 1..57: mol_type = other RNA
aaataaaaaaaaaaaaaaaaaaaaaaaaaaaaaaaaaaaaaaaaaaaaaaaaataaa

SEQ ID NO: 9694 - RNA, 57 nt, synthetic construct
  source 1..57: mol_type = other RNA
aaataaataaataaataaaaaaaaaaaaaaaaaaaaaaaaaaaaaaaaaaaaaataa

SEQ ID NO: 9695 - RNA, 57 nt, synthetic construct
  source 1..57: mol_type = other RNA
aaaaaaaaaaaaaaaaaaaaaaaaaaaaaaaaaaaaaaaaataaataaatatatata

SEQ ID NO: 9696 - RNA, 57 nt, synthetic construct
  source 1..57: mol_type = other RNA
aaaaataaataaatatataaataaataaataaataaataaataaataaataaatata

SEQ ID NO: 9697 - RNA, 57 nt, synthetic construct
  source 1..57: mol_type = other RNA
aaataaataaaaaaaaaaaaaaaaaaaaaaaaaaaaaaaaaaaaaaaaaaaaataaa

SEQ ID NO: 9698 - RNA, 57 nt, synthetic construct
  source 1..57: mol_type = other RNA
aaaaaaaaaaaaaaaaaaaaaaaaaaaaaaaaaaaaataaataaataaatatatata

SEQ ID NO: 9699 - RNA, 57 nt, synthetic construct
  source 1..57: mol_type = other RNA
aaaaaaaaaaaaaaaaaaaaaaaaaaaaaaaaataaataaataaataaatatatata

SEQ ID NO: 9700 - RNA, 57 nt, synthetic construct
  source 1..57: mol_type = other RNA
aaataaataaataaataaaaaaaaaaaaaaaaaaaaaaaaaaaaaaaaaaaaataaa

SEQ ID NO: 9701 - RNA, 57 nt, synthetic construct
  source 1..57: mol_type = other RNA
aaaaaaaaaaaaaaatataaataaataaataaataaataaataaataaataaataaa

SEQ ID NO: 9702 - RNA, 57 nt, synthetic construct
  source 1..57: mol_type = other RNA
aaaaaaaaaaaaaaaaaaaaaaaaaaaaaaaaaaaaaaaataaataaatataaatat

SEQ ID NO: 9703 - RNA, 57 nt, synthetic construct
  source 1..57: mol_type = other RNA
aaataaataaataaataaaaaaaaaaaaaaaaaaaaaaaaaaaaaaaaataaataaa

SEQ ID NO: 9704 - RNA, 57 nt, synthetic construct
  source 1..57: mol_type = other RNA
aaataaataaataaataaataaataaataaaaaaaaaaaaaaaaaaaaaataaataa

SEQ ID NO: 9705 - RNA, 57 nt, synthetic construct
  source 1..57: mol_type = other RNA
aaaaaaaaaaatataaataaataaataaataaataaataaataaataaataaataaa

SEQ ID NO: 9706 - RNA, 57 nt, synthetic construct
  source 1..57: mol_type = other RNA
aaaaaaaaaaaaaaaaaaaaaaaaaaaaaaaaaaaataaataaataaatataaatat

SEQ ID NO: 9707 - RNA, 57 nt, synthetic construct
  source 1..57: mol_type = other RNA
aaataaataaataaataaaaaaaaaaaaaaaaaaaaaaaaaaaaataaataaataaa

SEQ ID NO: 9708 - RNA, 57 nt, synthetic construct
  source 1..57: mol_type = other RNA
aaataaataaataaataaataaataaataaataaaaaaaaaaaaaaaaaataaataa

SEQ ID NO: 9709 - RNA, 57 nt, synthetic construct
  source 1..57: mol_type = other RNA
aaataaataaataaataaataaataaataaaaaaaaaaaaaaaaaataaataaataa

SEQ ID NO: 9710 - RNA, 57 nt, synthetic construct
  source 1..57: mol_type = other RNA
aaaaaaaaaaaaaaaaaaaaaaaaaaaaaaaaaaaaaaaaaaaaaaaaaaaaataat

SEQ ID NO: 9711 - RNA, 57 nt, synthetic construct
  source 1..57: mol_type = other RNA
aaataaataaataaataaaaaaaaaaaaaaaaaaaaaaaaataaataaataaataaa

SEQ ID NO: 9712 - RNA, 57 nt, synthetic construct
  source 1..57: mol_type = other RNA
aaataaataaataaataaataaataaataaataaataaaaaaaaaaaaaataaataa

SEQ ID NO: 9713 - RNA, 57 nt, synthetic construct
  source 1..57: mol_type = other RNA
aaataaataaataaataaataaataaataaataaaaaaaaaaaaaataaataaataa

SEQ ID NO: 9714 - RNA, 57 nt, synthetic construct
  source 1..57: mol_type = other RNA
aaataaaaaaaaaaaaaaaaaaaaaaaaaaaaaaaaaaaaaaaaaaaaaaaaaatat

SEQ ID NO: 9715 - RNA, 57 nt, synthetic construct
  source 1..57: mol_type = other RNA
aaataaataaataaataaataaataaataaataaataaaaaaaaaataaataaataa

SEQ ID NO: 9716 - RNA, 57 nt, synthetic construct
  source 1..57: mol_type = other RNA
aaataaataaataaataaataaataaataaataaataaataaaaaaaaaataaataa

SEQ ID NO: 9717 - RNA, 57 nt, synthetic construct
  source 1..57: mol_type = other RNA
aaataaataaaaaaaaaaaaaaaaaaaaaaaaaaaaaaaaaaaaaaaaaaaaaatat

SEQ ID NO: 9718 - RNA, 57 nt, synthetic construct
  source 1..57: mol_type = other RNA
aaataaataaataaataaataaataaataaataaataaaaaataaataaataaataa

SEQ ID NO: 9719 - RNA, 57 nt, synthetic construct
  source 1..57: mol_type = other RNA
aaataaataaataaataaataaataaataaataaataaataaaaaataaataaataa

SEQ ID NO: 9720 - RNA, 57 nt, synthetic construct
  source 1..57: mol_type = other RNA
aaaaaataaaaaaaaaaaaaaaaaaaaaaaaaaaaaaaaaaaaaaaaaaaaaatata

SEQ ID NO: 9721 - RNA, 57 nt, synthetic construct
  source 1..57: mol_type = other RNA
aaaaaaataaaaaaaaaaaaaaaaaaaaaaaaaaaaaaaaaaaaaaaaaaaaatata

SEQ ID NO: 9722 - RNA, 57 nt, synthetic construct
  source 1..57: mol_type = other RNA
aaaaaaaaaaaaaaaaaaaaaaaaaaaaaaaaaaaaaaaaaaaaaaaataaaatata

SEQ ID NO: 9723 - RNA, 57 nt, synthetic construct
  source 1..57: mol_type = other RNA
aaaaaaaaaaaaaataaaaaaaaaaaaaaaaaaaaaaaaaaaaaaaaaaaaaatata

SEQ ID NO: 9724 - RNA, 57 nt, synthetic construct
  source 1..57: mol_type = other RNA
aaaaaaaaaaaaaaaaaaaaataaaaaaaaaaaaaaaaaaaaaaaaaaaaaaatata

SEQ ID NO: 9725 - RNA, 57 nt, synthetic construct
  source 1..57: mol_type = other RNA
aaaaaaaaaaaaaaaaaaaaaaaaaaaaaaaaaaataaaaaaaaaaaaaaaaatata

SEQ ID NO: 9726 - RNA, 57 nt, synthetic construct
  source 1..57: mol_type = other RNA
aaaaaaaaaaaaaaaaaaaaaaaaaaaaaaaaaaaaataaaaaaaaaaaaaaatata

SEQ ID NO: 9727 - RNA, 57 nt, synthetic construct
  source 1..57: mol_type = other RNA
aaaaaaaaaaaaaaaaaaaaaaaaaaaaaaaaataaaaaaaaaaaaaaaaaaatata

SEQ ID NO: 9728 - RNA, 57 nt, synthetic construct
  source 1..57: mol_type = other RNA
aaaaaaaaaaaaaaaaaaaaaaaaaaaaataaaaaaaaaaaaaaaaaaaaaaatata

SEQ ID NO: 9729 - RNA, 57 nt, synthetic construct
  source 1..57: mol_type = other RNA
aaaaaaaaaaaaaaaaaaaaaaaaaaaaaaaaaaaaaaaaataaaaaaaaaaatata

SEQ ID NO: 9730 - RNA, 57 nt, synthetic construct
  source 1..57: mol_type = other RNA
aaaaaaaaaaaaaaaaaaaaaaaaaaaaaaaaaaaaaaaaaaaataaaaaaaatata

SEQ ID NO: 9731 - RNA, 57 nt, synthetic construct
  source 1..57: mol_type = other RNA
aaaaaaaaaaaaaaaaaaaaaaaaaaaataaaaaaaaaaaaaaaaaaaaaaaatata

SEQ ID NO: 9732 - RNA, 57 nt, synthetic construct
  source 1..57: mol_type = other RNA
aaaaaaaaaaaaaaaaaaaaaaaaaaaaaaaaaaaaaaaaaataaaaaaaaaatata

SEQ ID NO: 9733 - RNA, 57 nt, synthetic construct
  source 1..57: mol_type = other RNA
aaaaaaaaaaaaaaaaaaaaaaaaaataaaaaaaaaaaaaaaaaaaaaaaaaatata

SEQ ID NO: 9734 - RNA, 57 nt, synthetic construct
  source 1..57: mol_type = other RNA
aaaaaaaaaaaaaaaaaaaaaaaaaaaaaaaaaataaaaaaaaaaaaaaaaaatata

SEQ ID NO: 9735 - RNA, 57 nt, synthetic construct
  source 1..57: mol_type = other RNA
aaaaaaaataaaaaaaaaaaaaaaaaaaaaaaaaaaaaaaaaaaaaaaaaaaatata

SEQ ID NO: 9736 - RNA, 57 nt, synthetic construct
  source 1..57: mol_type = other RNA
aaaaaaaaaaaaataaaaaaaaaaaaaaaaaaaaaaaaaaaaaaaaaaaaaaatata

SEQ ID NO: 9737 - RNA, 57 nt, synthetic construct
  source 1..57: mol_type = other RNA
aaaaaaaaaaaaaaaaaataaaaaaaaaaaaaaaaaaaaaaaaaaaaaaaaaatata

SEQ ID NO: 9738 - RNA, 57 nt, synthetic construct
  source 1..57: mol_type = other RNA
aaaaaaaaaaaaaaaaaaaaaaaaaaaaaaaaaaaaaaataaaaaaaaaaaaatata

SEQ ID NO: 9739 - RNA, 57 nt, synthetic construct
  source 1..57: mol_type = other RNA
aaaaaaaaaaaaaaaaaaaaaaaaaaaaaaataaaaaaaaaaaaaaaaaaaaatata

SEQ ID NO: 9740 - RNA, 57 nt, synthetic construct
  source 1..57: mol_type = other RNA
aaaaaaaaaaaaaaaaaaaaaaaaaaaaaataaaaaaaaaaaaaaaaaaaaaatata

SEQ ID NO: 9741 - RNA, 57 nt, synthetic construct
  source 1..57: mol_type = other RNA
aaaaaaaaaaaaaaaaataaaaaaaaaaaaaaaaaaaaaaaaaaaaaaaaaaatata

SEQ ID NO: 9742 - RNA, 57 nt, synthetic construct
  source 1..57: mol_type = other RNA
aaaaaaaaaaaaaaaaaaaataaaaaaaaaaaaaaaaaaaaaaaaaaaaaaaatata

SEQ ID NO: 9743 - RNA, 57 nt, synthetic construct
  source 1..57: mol_type = other RNA
aaaaaaaaaaaaaaataaaaaaaaaaaaaaaaaaaaaaaaaaaaaaaaaaaaatata

SEQ ID NO: 9744 - RNA, 57 nt, synthetic construct
  source 1..57: mol_type = other RNA
aaaaaaaaaaaaaaaaaaaaaaaaaaaaaaaaaaaaaaaaaaataaaaaaaaatata

SEQ ID NO: 9745 - RNA, 57 nt, synthetic construct
  source 1..57: mol_type = other RNA
aaaaaaaaaaataaaaaaaaaaaaaaaaaaaaaaaaaaaaaaaaaaaaaaaaatata

SEQ ID NO: 9746 - RNA, 57 nt, synthetic construct
  source 1..57: mol_type = other RNA
aaaaaaaaaaaaaaaaaaaaaaaaataaaaaaaaaaaaaaaaaaaaaaaaaaatata

SEQ ID NO: 9747 - RNA, 57 nt, synthetic construct
  source 1..57: mol_type = other RNA
aaaaaaaaaaaaaaaaaaaaaaaaaaataaaaaaaaaaaaaaaaaaaaaaaaatata

SEQ ID NO: 9748 - RNA, 57 nt, synthetic construct
  source 1..57: mol_type = other RNA
aaaaaaaaaaaaaaaaaaaaaaaaaaaaaaaaaaaaaaaataaaaaaaaaaaatata

SEQ ID NO: 9749 - RNA, 57 nt, synthetic construct
  source 1..57: mol_type = other RNA
aaaaaaaaaaaaaaaaaaaaaaaataaaaaaaaaaaaaaaaaaaaaaaaaaaatata

SEQ ID NO: 9750 - RNA, 57 nt, synthetic construct
  source 1..57: mol_type = other RNA
aaaaaaaaaaaaaaaaaaaaaaaaaaaaaaaaaaaaaataaaaaaaaaaaaaatata

SEQ ID NO: 9751 - RNA, 57 nt, synthetic construct
  source 1..57: mol_type = other RNA
aaaaaaaaaaaaaaaaaaaaaaaaaaaaaaaaaaaaaaaaaaaaaataaaaaatata

SEQ ID NO: 9752 - RNA, 57 nt, synthetic construct
  source 1..57: mol_type = other RNA
aaaaaaaaaaaaaaaaaaataaaaaaaaaaaaaaaaaaaaaaaaaaaaaaaaatata

SEQ ID NO: 9753 - RNA, 57 nt, synthetic construct
  source 1..57: mol_type = other RNA
aaaaaaaaaaaaaaaaaaaaaaaaaaaaaaaaaaaaaaaaaaaaaaataaaaatata

SEQ ID NO: 9754 - RNA, 57 nt, synthetic construct
  source 1..57: mol_type = other RNA
aaaaaaaaaaaaaaaaaaaaaaaaaaaaaaaataaaaaaaaaaaaaaaaaaaatata

SEQ ID NO: 9755 - RNA, 57 nt, synthetic construct
  source 1..57: mol_type = other RNA
aaaaaaaaaaaataaaaaaaaaaaaaaaaaaaaaaaaaaaaaaaaaaaaaaaatata

SEQ ID NO: 9756 - RNA, 58 nt, synthetic construct
  source 1..58: mol_type = other RNA
aaaaaaaaaaaaaaaaaaaaaaaaaaaaaaaaaaaaaaaaaaaaaaaaaaaaaatata

SEQ ID NO: 9757 - RNA, 58 nt, synthetic construct
  source 1..58: mol_type = other RNA
aaaaaaaaaaaaaaaaaaaaaaaaaaaaaaaaaaaaaaaaaaaaaaaaaataaatata

SEQ ID NO: 9758 - RNA, 58 nt, synthetic construct
  source 1..58: mol_type = other RNA
aaaaaaaaaaaaaaaaaaaaaaaaaaaaaaaaaaaaaaaaaaaaaataaataaatata

SEQ ID NO: 9759 - RNA, 58 nt, synthetic construct
  source 1..58: mol_type = other RNA
aaaaaaaaaaaaaaaaaaaaaaaaaaaaaaaaaaaaaaaaaataaataaataaatata

SEQ ID NO: 9760 - RNA, 58 nt, synthetic construct
  source 1..58: mol_type = other RNA
aaaaaaaaaaaaaaaaaaaaaaaaaaaaaaaaaaaaaaaaaaaaaaaatataaatata

SEQ ID NO: 9761 - RNA, 58 nt, synthetic construct
  source 1..58: mol_type = other RNA
aaaaaaaaaaaaaaaaaaaaaaaaaaaaaaaaaaaaaaaaaaaatataaataaatata

SEQ ID NO: 9762 - RNA, 58 nt, synthetic construct
  source 1..58: mol_type = other RNA
aaaaaaaaaaaaaaaaaaaaaaaaaaaaaaaataaataaatataaataaataaatata

SEQ ID NO: 9763 - RNA, 58 nt, synthetic construct
  source 1..58: mol_type = other RNA
aaataaaaaaaaaaaaaaaaaaaaaaaaaaaaaaaaaaaaaaaaaaaaaaaaaatata

SEQ ID NO: 9764 - RNA, 58 nt, synthetic construct
  source 1..58: mol_type = other RNA
aaataaataaataaaaaaaaaaaaaaaaaaaaaaaaaaaaaaaaaaaaaaaaaatata

SEQ ID NO: 9765 - RNA, 58 nt, synthetic construct
  source 1..58: mol_type = other RNA
aaataaataaataaataaaaaaaaaaaaaaaaaaaaaaaaaaaaaaaaaaaaaatata

SEQ ID NO: 9766 - RNA, 58 nt, synthetic construct
  source 1..58: mol_type = other RNA
aaaaaaaaaaaaaaaaaaaaaaaaaaaaaaaaaaaaaaaaaaaaaaaaaaaatatata

SEQ ID NO: 9767 - RNA, 58 nt, synthetic construct
  source 1..58: mol_type = other RNA
aaataaataaataaataaataaataaaaaaaaaaaaaaaaaaaaaaaaaaaaaatata

SEQ ID NO: 9768 - RNA, 58 nt, synthetic construct
  source 1..58: mol_type = other RNA
aaataaataaataaataaataaataaaaaaaaaaaaaaaaaaaaaaaaaataaatata

SEQ ID NO: 9769 - RNA, 58 nt, synthetic construct
  source 1..58: mol_type = other RNA
aaataaataaataaataaataaataaataaaaaaaaaaaaaaaaaaaaaaaaaatata

SEQ ID NO: 9770 - RNA, 58 nt, synthetic construct
  source 1..58: mol_type = other RNA
aaaaaaaaaaaaaaaaaaaaaaaaaaaaaaaaaaaaaaaataaataaataaatatata

SEQ ID NO: 9771 - RNA, 58 nt, synthetic construct
  source 1..58: mol_type = other RNA
aaataaataaataaataaataaataaataaaaaaaaaaaaaaaaaaaaaataaatata

SEQ ID NO: 9772 - RNA, 58 nt, synthetic construct
  source 1..58: mol_type = other RNA
aaaaaaaaaaaaaaaaaaaaaaaaaaaaaaaaaaaaaaaaaaaaaaaaaaaaaataaa

SEQ ID NO: 9773 - RNA, 58 nt, synthetic construct
  source 1..58: mol_type = other RNA
aaaaaaaaaaaaaaaaaaaaaaaaaaaaaaaaaaaaaataaataaataaataaataaa

SEQ ID NO: 9774 - RNA, 58 nt, synthetic construct
  source 1..58: mol_type = other RNA
aaaaaaaaaaaaaaaaaaaaaaaaaaaaaaaaaaaaaaaaaaaaaaaaaaataaatat

SEQ ID NO: 9775 - RNA, 58 nt, synthetic construct
  source 1..58: mol_type = other RNA
aaaaaaaaaaaaaaaaaaaaaaaaaaaaaaaaaaaaaaaaaaaaaaataaataaatat

SEQ ID NO: 9776 - RNA, 58 nt, synthetic construct
  source 1..58: mol_type = other RNA
aaaaaaaaaaaaaaaaaaaaaaaaaaaaaaaaaaaaaaaaaaataaataaataaatat

SEQ ID NO: 9777 - RNA, 58 nt, synthetic construct
  source 1..58: mol_type = other RNA
aaaaaaaaaaaaaaaaaaaaaaaaaaaaaaaaaaaaaaataaataaataaataaatat

SEQ ID NO: 9778 - RNA, 58 nt, synthetic construct
  source 1..58: mol_type = other RNA
aaaaaaaaaaaaaaaaaaaaaaaaaaaaaaaaaaataaataaataaataaataaatat

SEQ ID NO: 9779 - RNA, 58 nt, synthetic construct
  source 1..58: mol_type = other RNA
aaaaaaaaaaaaaaaaaaaaaaaaaaaaaaaaaaaaaaaaaaaaaaaaaaaaaaaata

SEQ ID NO: 9780 - RNA, 58 nt, synthetic construct
  source 1..58: mol_type = other RNA
aaatataaaaaaaaaaaaaaaaaaaaaaaaaaaaaaaaaaaaaaaaaaaaaaaatata

SEQ ID NO: 9781 - RNA, 58 nt, synthetic construct
  source 1..58: mol_type = other RNA
aaatataaataaaaaaaaaaaaaaaaaaaaaaaaaaaaaaaaaaaaaaaaaaaatata

SEQ ID NO: 9782 - RNA, 58 nt, synthetic construct
  source 1..58: mol_type = other RNA
aaatataaataaataaaaaaaaaaaaaaaaaaaaaaaaaaaaaaaaaaaaaaaatata

SEQ ID NO: 9783 - RNA, 58 nt, synthetic construct
  source 1..58: mol_type = other RNA
aaataaataaataaatataaaaaaaaaaaaaaaaaaaaaaaaaaaaaaaaaaaatata

SEQ ID NO: 9784 - RNA, 58 nt, synthetic construct
  source 1..58: mol_type = other RNA
aaataaataaataaataaataaatataaaaaaaaaaaaaaaaaaaaaaaaaaaatata

SEQ ID NO: 9785 - RNA, 58 nt, synthetic construct
  source 1..58: mol_type = other RNA
aaataaataaataaataaataaatataaaaaaaaaaaaaaaaaaaaaaaataaatata

SEQ ID NO: 9786 - RNA, 58 nt, synthetic construct
  source 1..58: mol_type = other RNA
aaaaaaaaaaaaaaaaaaaaaaaaaaaaaaaaaaaaaaaaaaaaataaatataaataa

SEQ ID NO: 9787 - RNA, 58 nt, synthetic construct
  source 1..58: mol_type = other RNA
aaaaaaaaaaaaaaaaaaaaaaaaaaaaaataaataaatataaataaataaatatata

SEQ ID NO: 9788 - RNA, 58 nt, synthetic construct
  source 1..58: mol_type = other RNA
aaatataaataaataaataaataaataaaaaaaaaaaaaaaataaataaataaatata

SEQ ID NO: 9789 - RNA, 58 nt, synthetic construct
  source 1..58: mol_type = other RNA
aaataaatataaataaataaataaataaaaaaaaaaaaaaaataaataaataaatata

SEQ ID NO: 9790 - RNA, 58 nt, synthetic construct
  source 1..58: mol_type = other RNA
aaataaataaataaatataaataaataaaaaaaaaaaaaaaataaataaataaatata

SEQ ID NO: 9791 - RNA, 58 nt, synthetic construct
  source 1..58: mol_type = other RNA
aaataaataaatataaataaataaataaaaaaaaaaaaaaaataaataaataaatata

SEQ ID NO: 9792 - RNA, 58 nt, synthetic construct
  source 1..58: mol_type = other RNA
aaaaaaaaaaaaaaaaaaaaaaaaaaaaaataaatataaataaataaataaatatata

SEQ ID NO: 9793 - RNA, 58 nt, synthetic construct
  source 1..58: mol_type = other RNA
aaatataaataaataaataaataaataaaaaaaaaaaataaataaataaataaatata

SEQ ID NO: 9794 - RNA, 58 nt, synthetic construct
  source 1..58: mol_type = other RNA
aaataaataaataaatataaataaataaaaaaaaaaaataaataaataaataaatata

SEQ ID NO: 9795 - RNA, 58 nt, synthetic construct
  source 1..58: mol_type = other RNA
aaataaatataaataaataaataaataaaaaaaaaaaataaataaataaataaatata

SEQ ID NO: 9796 - RNA, 58 nt, synthetic construct
  source 1..58: mol_type = other RNA
aaatataaataaataaataaataaataaataaaaaaaaaaaataaataaataaatata

SEQ ID NO: 9797 - RNA, 58 nt, synthetic construct
  source 1..58: mol_type = other RNA
aaataaataaatataaataaataaataaaaaaaaaaaataaataaataaataaatata

SEQ ID NO: 9798 - RNA, 58 nt, synthetic construct
  source 1..58: mol_type = other RNA
aaataaatataaataaataaataaataaataaaaaaaaaaaataaataaataaatata

SEQ ID NO: 9799 - RNA, 58 nt, synthetic construct
  source 1..58: mol_type = other RNA
aaatataaataaataaataaataaataaataaaaaaaataaataaataaataaatata

SEQ ID NO: 9800 - RNA, 58 nt, synthetic construct
  source 1..58: mol_type = other RNA
aaataaataaataaatataaataaataaataaaaaaaataaataaataaataaatata

SEQ ID NO: 9801 - RNA, 58 nt, synthetic construct
  source 1..58: mol_type = other RNA
aaataaatataaataaataaataaataaataaaaaaaataaataaataaataaatata

SEQ ID NO: 9802 - RNA, 58 nt, synthetic construct
  source 1..58: mol_type = other RNA
aaataaataaatataaataaataaataaataaaaaaaataaataaataaataaatata

SEQ ID NO: 9803 - RNA, 58 nt, synthetic construct
  source 1..58: mol_type = other RNA
aaataaataaataaaaaaaaaaaaaaaaaaaaaaaaaaaaaaaaaaaaaaaatatata

SEQ ID NO: 9804 - RNA, 58 nt, synthetic construct
  source 1..58: mol_type = other RNA
aaatataaataaataaataaataaataaataaataaaataaataaataaataaatata

SEQ ID NO: 9805 - RNA, 58 nt, synthetic construct
  source 1..58: mol_type = other RNA
aaataaataaataaataaaaaaaaaaaaaaaaaaaaaaaaaaaaaaaaaaaatatata

SEQ ID NO: 9806 - RNA, 58 nt, synthetic construct
  source 1..58: mol_type = other RNA
aaataaataaataaaaaaaaaaaaaaaaaaaaaaaaaaaaaaaaaaaaaaaaaaataa

SEQ ID NO: 9807 - RNA, 58 nt, synthetic construct
  source 1..58: mol_type = other RNA
aaataaaaaaaaaaaaaaaaaaaaaaaaaaaaaaaaaaaaaaaaaaaaaaaaaataaa

SEQ ID NO: 9808 - RNA, 58 nt, synthetic construct
  source 1..58: mol_type = other RNA
aaataaataaataaataaaaaaaaaaaaaaaaaaaaaaaaaaaaaaaaaaaaaaataa

SEQ ID NO: 9809 - RNA, 58 nt, synthetic construct
  source 1..58: mol_type = other RNA
aaataaataaataaataaataaaaaaaaaaaaaaaaaaaaaaaaaaaaaaaaaaataa

SEQ ID NO: 9810 - RNA, 58 nt, synthetic construct
  source 1..58: mol_type = other RNA
aaaaaaaaaaaaaaaaaaaaaaaaaaaaaaaaaaaaaaaaaaaaaaaaatataaatat

SEQ ID NO: 9811 - RNA, 58 nt, synthetic construct
  source 1..58: mol_type = other RNA
aaataaataaataaaaaaaaaaaaaaaaaaaaaaaaaaaaaaaaaaaaaaaaaataaa

SEQ ID NO: 9812 - RNA, 58 nt, synthetic construct
  source 1..58: mol_type = other RNA
aaaaataaataaataaataaataaataaataaatataaataaataaataaataaataa

SEQ ID NO: 9813 - RNA, 58 nt, synthetic construct
  source 1..58: mol_type = other RNA
aaataaaaaaaaaaaaaaaaaaaaaaaaaaaaaaaaaataaataaataaataaataaa

SEQ ID NO: 9814 - RNA, 58 nt, synthetic construct
  source 1..58: mol_type = other RNA
aaataaaaaaaaaaaaaaaaaaaaaaaaaaaaaataaataaataaataaataaataaa

SEQ ID NO: 9815 - RNA, 58 nt, synthetic construct
  source 1..58: mol_type = other RNA
aaaaaaaaaaaaaaaaaaaaaaaaaaaaaaaaatataaataaataaataaataaatat

SEQ ID NO: 9816 - RNA, 58 nt, synthetic construct
  source 1..58: mol_type = other RNA
aaaaaaaaaaaaaaaaaaaaaaaaaaaaaaaaaaaaaaaaaaaaaaaaaaaaaataat

SEQ ID NO: 9817 - RNA, 58 nt, synthetic construct
  source 1..58: mol_type = other RNA
aaaaaaaaaaaaaaaaaaaaaaaaaaaaataaatataaataaataaataaataaatat

SEQ ID NO: 9818 - RNA, 58 nt, synthetic construct
  source 1..58: mol_type = other RNA
aaaaaaaaataaaaaaaaaaaaaaaaaaaaaaaaaaaaaaaaaaaaaaaaaaaatata

SEQ ID NO: 9819 - RNA, 58 nt, synthetic construct
  source 1..58: mol_type = other RNA
aaaaaaaaaaaaataaaaaaaaaaaaaaaaaaaaaaaaaaaaaaaaaaaaaaaatata

SEQ ID NO: 9820 - RNA, 58 nt, synthetic construct
  source 1..58: mol_type = other RNA
aaaaaaaaaaaaaaaaaaaaaaaaaaaaaaaaataaaaaaaaaaaaaaaaaaaatata

SEQ ID NO: 9821 - RNA, 58 nt, synthetic construct
  source 1..58: mol_type = other RNA
aaaaaaaaaaaataaaaaaaaaaaaaaaaaaaaaaaaaaaaaaaaaaaaaaaaatata

SEQ ID NO: 9822 - RNA, 58 nt, synthetic construct
  source 1..58: mol_type = other RNA
aaaaaaaaaaaaaaaataaaaaaaaaaaaaaaaaaaaaaaaaaaaaaaaaaaaatata

SEQ ID NO: 9823 - RNA, 58 nt, synthetic construct
  source 1..58: mol_type = other RNA
aaaaaaaaaaaaaaaaaaaaaaaaaaaaaaaaaaaaaaaaataaaaaaaaaaaatata

SEQ ID NO: 9824 - RNA, 58 nt, synthetic construct
  source 1..58: mol_type = other RNA
aaaaaaaaaaaaaaaaaaaataaaaaaaaaaaaaaaaaaaaaaaaaaaaaaaaatata

SEQ ID NO: 9825 - RNA, 58 nt, synthetic construct
  source 1..58: mol_type = other RNA
aaaaaaaaaaaaaaaaaaaaaaaaaaaaaaaaaaaaaaaataaaaaaaaaaaaatata

SEQ ID NO: 9826 - RNA, 58 nt, synthetic construct
  source 1..58: mol_type = other RNA
aaaaaaataaaaaaaaaaaaaaaaaaaaaaaaaaaaaaaaaaaaaaaaaaaaaatata

SEQ ID NO: 9827 - RNA, 58 nt, synthetic construct
  source 1..58: mol_type = other RNA
aaaaaaaaaaaaaaaaaaataaaaaaaaaaaaaaaaaaaaaaaaaaaaaaaaaatata

SEQ ID NO: 9828 - RNA, 58 nt, synthetic construct
  source 1..58: mol_type = other RNA
aaaaaaaaaaaaaaaaaaaaaataaaaaaaaaaaaaaaaaaaaaaaaaaaaaaatata

SEQ ID NO: 9829 - RNA, 58 nt, synthetic construct
  source 1..58: mol_type = other RNA
aaaaaaaaaaaaaaaaaaaaaaaaaaaaaaaaaaaaaaataaaaaaaaaaaaaatata

SEQ ID NO: 9830 - RNA, 58 nt, synthetic construct
  source 1..58: mol_type = other RNA
aaaaaaaaaaaaaaaaaaaaaaataaaaaaaaaaaaaaaaaaaaaaaaaaaaaatata

SEQ ID NO: 9831 - RNA, 58 nt, synthetic construct
  source 1..58: mol_type = other RNA
aaaaaaaaaaaaaaaaaaaaaaaaaataaaaaaaaaaaaaaaaaaaaaaaaaaatata

SEQ ID NO: 9832 - RNA, 58 nt, synthetic construct
  source 1..58: mol_type = other RNA
aaaaaaaaaaaaaaaaaaaaaaaaaaaaataaaaaaaaaaaaaaaaaaaaaaaatata

SEQ ID NO: 9833 - RNA, 58 nt, synthetic construct
  source 1..58: mol_type = other RNA
aaaaaaaaaaaaaaaaaaaaaaaataaaaaaaaaaaaaaaaaaaaaaaaaaaaatata

SEQ ID NO: 9834 - RNA, 58 nt, synthetic construct
  source 1..58: mol_type = other RNA
aaaaaaaaaaaaaaaaaaaaaaaaaaaaaaaaaaaaaaaaaaaaaaaaataaaatata

SEQ ID NO: 9835 - RNA, 58 nt, synthetic construct
  source 1..58: mol_type = other RNA
aaaaaaaaaaaaaaaaaaaaaaaaaaaataaaaaaaaaaaaaaaaaaaaaaaaatata

SEQ ID NO: 9836 - RNA, 58 nt, synthetic construct
  source 1..58: mol_type = other RNA
aaaaaaaaaaaaaaaaaaaaaaaaaaaaaaaaaaaaaaaaaaaaaaataaaaaatata

SEQ ID NO: 9837 - RNA, 58 nt, synthetic construct
  source 1..58: mol_type = other RNA
aaaaaaaaaataaaaaaaaaaaaaaaaaaaaaaaaaaaaaaaaaaaaaaaaaaatata

SEQ ID NO: 9838 - RNA, 58 nt, synthetic construct
  source 1..58: mol_type = other RNA
aaaaaaaaaaaaaaaaaaaaaaaaaaaaaaaaaaaataaaaaaaaaaaaaaaaatata

SEQ ID NO: 9839 - RNA, 58 nt, synthetic construct
  source 1..58: mol_type = other RNA
aaaaaaaaaaaaaaaaaaaaaaaaaaaaaaaaaaaaaaaaaaaataaaaaaaaatata

SEQ ID NO: 9840 - RNA, 58 nt, synthetic construct
  source 1..58: mol_type = other RNA
aaaaaaaaaaaaaataaaaaaaaaaaaaaaaaaaaaaaaaaaaaaaaaaaaaaatata

SEQ ID NO: 9841 - RNA, 58 nt, synthetic construct
  source 1..58: mol_type = other RNA
aaaaaataaaaaaaaaaaaaaaaaaaaaaaaaaaaaaaaaaaaaaaaaaaaaaatata

SEQ ID NO: 9842 - RNA, 58 nt, synthetic construct
  source 1..58: mol_type = other RNA
aaaaaaaaaaaaaaaaaataaaaaaaaaaaaaaaaaaaaaaaaaaaaaaaaaaatata

SEQ ID NO: 9843 - RNA, 58 nt, synthetic construct
  source 1..58: mol_type = other RNA
aaaaaaaaaaaaaaaaaaaaaaaaaaataaaaaaaaaaaaaaaaaaaaaaaaaatata

SEQ ID NO: 9844 - RNA, 58 nt, synthetic construct
  source 1..58: mol_type = other RNA
aaaataaaaaaaaaaaaaaaaaaaaaaaaaaaaaaaaaaaaaaaaaaaaaaaaatata

SEQ ID NO: 9845 - RNA, 58 nt, synthetic construct
  source 1..58: mol_type = other RNA
aaaaaaaaaaaaaaaaaaaaaaaaaaaaaaaaaataaaaaaaaaaaaaaaaaaatata

SEQ ID NO: 9846 - RNA, 58 nt, synthetic construct
  source 1..58: mol_type = other RNA
aaaaaaataaataaaaaaaaaaaaaaaaaaaaaaaaaaaaaaaaaaaaaaaaaatata

SEQ ID NO: 9847 - RNA, 58 nt, synthetic construct
  source 1..58: mol_type = other RNA
aaaaaaaaaaaaataaaaaaaaaaaaaaaaaaaaaaaaaaaaaaaaaaaataaatata

SEQ ID NO: 9848 - RNA, 58 nt, synthetic construct
  source 1..58: mol_type = other RNA
aaaaaaaaataaataaaaaaaaaaaaaaaaaaaaaaaaaaaaaaaaaaaaaaaatata

SEQ ID NO: 9849 - RNA, 58 nt, synthetic construct
  source 1..58: mol_type = other RNA
aaaaaaaaaaaaataaataaaaaaaaaaaaaaaaaaaaaaaaaaaaaaaaaaaatata

SEQ ID NO: 9850 - RNA, 58 nt, synthetic construct
  source 1..58: mol_type = other RNA
aaaaaataaaaaaaaaaaaaaaaaaaaaaaaaaaaaaaaaaaaaaaaaaataaatata

SEQ ID NO: 9851 - RNA, 58 nt, synthetic construct
  source 1..58: mol_type = other RNA
aaaaaaataaaaaaaaaaaaaaaaaaaaaaaaaaaaaaaaaaaaaaaaaataaatata

SEQ ID NO: 9852 - RNA, 58 nt, synthetic construct
  source 1..58: mol_type = other RNA
aaaataaaaaaaaaaaaaaaaaaaaaaaaaaaaaaaaaaaaaaaaaaaaataaatata

SEQ ID NO: 9853 - RNA, 58 nt, synthetic construct
  source 1..58: mol_type = other RNA
aaaaaaaaaataaaaaaaaaaaaaaaaaaaaaaaaaaaaaaaaaaaaaaataaatata

SEQ ID NO: 9854 - RNA, 58 nt, synthetic construct
  source 1..58: mol_type = other RNA
aaaaaaaaaaaaaaaaaaaaataaaaaaaaaaaaaaaaaaaaaaaaaaaataaatata

SEQ ID NO: 9855 - RNA, 58 nt, synthetic construct
  source 1..58: mol_type = other RNA
aaaaaaaaaaaaaaaaaaaaaaaaaaaaaataaaaaaaaaaaaaaaaaaataaatata

SEQ ID NO: 9856 - RNA, 58 nt, synthetic construct
  source 1..58: mol_type = other RNA
aaaaaaaaaaaaaaaaaaaaaaaaaaaaaaaaaaaaaaataaaaaaaaaataaatata

SEQ ID NO: 9857 - RNA, 58 nt, synthetic construct
  source 1..58: mol_type = other RNA
aaaaaaaaaaaaaaaaaaataaataaaaaaaaaaaaaaaaaaaaaaaaaaaaaatata

SEQ ID NO: 9858 - RNA, 58 nt, synthetic construct
  source 1..58: mol_type = other RNA
aaaaaaaaaaaaaaaaaataaataaaaaaaaaaaaaaaaaaaaaaaaaaaaaaatata

SEQ ID NO: 9859 - RNA, 58 nt, synthetic construct
  source 1..58: mol_type = other RNA
aaaataaataaaaaaaaaaaaaaaaaaaaaaaaaaaaaaaaaaaaaaaaaaaaatata

SEQ ID NO: 9860 - RNA, 58 nt, synthetic construct
  source 1..58: mol_type = other RNA
aaaaaaaaaaaaaaaaaaaaaaaaaaaaaaaaaaaaaaataaataaaaaaaaaatata

SEQ ID NO: 9861 - RNA, 58 nt, synthetic construct
  source 1..58: mol_type = other RNA
aaaaataaataaaaaaaaaaaaaaaaaaaaaaaaaaaaaaaaaaaaaaaaaaaatata

SEQ ID NO: 9862 - RNA, 58 nt, synthetic construct
  source 1..58: mol_type = other RNA
aaaaaaaaaaaaaaaaaaaaaaataaataaaaaaaaaaaaaaaaaaaaaaaaaatata

SEQ ID NO: 9863 - RNA, 58 nt, synthetic construct
  source 1..58: mol_type = other RNA
aaaaaaaaaaaaaaaaaaaaaataaataaaaaaaaaaaaaaaaaaaaaaaaaaatata

SEQ ID NO: 9864 - RNA, 58 nt, synthetic construct
  source 1..58: mol_type = other RNA
aaaaaataaataaaaaaaaaaaaaaaaaaaaaaaaaaaaaaaaaaaaaaaaaaatata

SEQ ID NO: 9865 - RNA, 58 nt, synthetic construct
  source 1..58: mol_type = other RNA
aaaaaaaaaataaataaaaaaaaaaaaaaaaaaaaaaaaaaaaaaaaaaaaaaatata

SEQ ID NO: 9866 - RNA, 58 nt, synthetic construct
  source 1..58: mol_type = other RNA
aaaaaaaaaaaaaataaataaaaaaaaaaaaaaaaaaaaaaaaaaaaaaaaaaatata

SEQ ID NO: 9867 - RNA, 59 nt, synthetic construct
  source 1..59: mol_type = other RNA
aaaaaaaaaaaaaaaaaaaaaaaaaaaaaaaaaaaaaaaaaaaaaaaaaaaaaaatata

SEQ ID NO: 9868 - RNA, 59 nt, synthetic construct
  source 1..59: mol_type = other RNA
aaaaaaaaaaaaaaaaaaaaaaaaaaaaaaaaaaaaaaaaaaaaaaaaaaataaatata

SEQ ID NO: 9869 - RNA, 59 nt, synthetic construct
  source 1..59: mol_type = other RNA
aaaaaaaaaaaaaaaaaaaaaaaaaaaaaaaaaaaaaaaaaaaaaaataaataaatata

SEQ ID NO: 9870 - RNA, 59 nt, synthetic construct
  source 1..59: mol_type = other RNA
aaaaaaaaaaaaaaaaaaaaaaaaaaaaaaaaaaaaaaaaaaataaataaataaatata

SEQ ID NO: 9871 - RNA, 59 nt, synthetic construct
  source 1..59: mol_type = other RNA
aaaaaaaaaaaaaaaaaaaaaaaaaaaaaaaaaaaaaaataaataaataaataaatata

SEQ ID NO: 9872 - RNA, 59 nt, synthetic construct
  source 1..59: mol_type = other RNA
aaaaaaaaaaaaaaaaaaaaaaaaaaaaaaaaaaataaataaataaataaataaatata

SEQ ID NO: 9873 - RNA, 59 nt, synthetic construct
  source 1..59: mol_type = other RNA
aaaaaaaaaaaaaaaaaaaaaaaaaaaaaaaaaaaaaaaaatataaataaataaatata

SEQ ID NO: 9874 - RNA, 59 nt, synthetic construct
  source 1..59: mol_type = other RNA
aaaaaaaaaaaaaaaaaaaaaaaaaaaaaaaaaaaaataaatataaataaataaatata

SEQ ID NO: 9875 - RNA, 59 nt, synthetic construct
  source 1..59: mol_type = other RNA
aaaaaaaaaaaaaaaaaaaaaaaaaaaaaaaaaaaaataaataaataaatataaatata

SEQ ID NO: 9876 - RNA, 59 nt, synthetic construct
  source 1..59: mol_type = other RNA
aaaaaaaaaaaaaaaaaaaaaaaaaaaaaaaaaaaaataaataaatataaataaatata

SEQ ID NO: 9877 - RNA, 59 nt, synthetic construct
  source 1..59: mol_type = other RNA
aaaaaaaaaaaaaaaaaaaaaaaaaaaaaaaaaaaaatataaataaataaataaatata

SEQ ID NO: 9878 - RNA, 59 nt, synthetic construct
  source 1..59: mol_type = other RNA
aaaaaaaaaaaaaaaaaaaaaaaaaaaaaaaaataaataaatataaataaataaatata

SEQ ID NO: 9879 - RNA, 59 nt, synthetic construct
  source 1..59: mol_type = other RNA
aaaaaaaaaaaaaaaaaaaaaaaaaaaaaaaaataaataaataaataaatataaatata

SEQ ID NO: 9880 - RNA, 59 nt, synthetic construct
  source 1..59: mol_type = other RNA
aaaaaaaaaaaaaaaaaaaaaaaaaaaaaaaaataaataaataaatataaataaatata

SEQ ID NO: 9881 - RNA, 59 nt, synthetic construct
  source 1..59: mol_type = other RNA
aaaaaaaaaaaaaaaaaaaaataaataaatataaataaataaataaataaataaatata

SEQ ID NO: 9882 - RNA, 59 nt, synthetic construct
  source 1..59: mol_type = other RNA
aaataaaaaaaaaaaaaaaaaaaaaaaaaaaaaaaaaaaaaaataaataaataaatata

SEQ ID NO: 9883 - RNA, 59 nt, synthetic construct
  source 1..59: mol_type = other RNA
aaaaaaaaaaaaaaaaaaaaaaaaaaaaaaaaaaaaaaaaaaaaaaaaaaaaatatata

SEQ ID NO: 9884 - RNA, 59 nt, synthetic construct
  source 1..59: mol_type = other RNA
aaaaaaaaaaaaaaaaaaaaaaaaaaaaaaaaaaaaaaaaaaaaaaaaataaatatata

SEQ ID NO: 9885 - RNA, 59 nt, synthetic construct
  source 1..59: mol_type = other RNA
aaataaaaaaaaaaaaaaaaaaaaaaaaaaaaaaaaaaataaataaataaataaatata

SEQ ID NO: 9886 - RNA, 59 nt, synthetic construct
  source 1..59: mol_type = other RNA
aaaaaaaaaaaaaaaaaaaaaaaaaaaaaaaaaaaaaaaaaaaaaaaaaaaaaaaataa

SEQ ID NO: 9887 - RNA, 59 nt, synthetic construct
  source 1..59: mol_type = other RNA
aaaaaaaaaaaaaaaaaaaaaaaaaaaaaaaaaaaaaaaaaaaaaaaaaaaataaataa

SEQ ID NO: 9888 - RNA, 59 nt, synthetic construct
  source 1..59: mol_type = other RNA
aaataaataaaaaaaaaaaaaaaaaaaaaaaaaaataaataaataaataaataaatata

SEQ ID NO: 9889 - RNA, 59 nt, synthetic construct
  source 1..59: mol_type = other RNA
aaaaaaaaaaaaaaaaaaaaaaaaaaaaaaaaaaaaaaaaaaaaaaaataaataaataa

SEQ ID NO: 9890 - RNA, 59 nt, synthetic construct
  source 1..59: mol_type = other RNA
aaataaataaataaaaaaaaaaaaaaaaaaaaaaataaataaataaataaataaatata

SEQ ID NO: 9891 - RNA, 59 nt, synthetic construct
  source 1..59: mol_type = other RNA
aaataaataaaaaaaaaaaaaaaaaaaaaaataaataaataaataaataaataaatata

SEQ ID NO: 9892 - RNA, 59 nt, synthetic construct
  source 1..59: mol_type = other RNA
aaaaaaaaaaaaaaaaaaaaaaaaaaaaaaaaaaaaaaaaaaaaaaaaaaaaaaataaa

SEQ ID NO: 9893 - RNA, 59 nt, synthetic construct
  source 1..59: mol_type = other RNA
aaaaaaaaaaaaaaaaaaaaaaaaaaaaaaaaaaaaaaaaaaaataaataaataaataa

SEQ ID NO: 9894 - RNA, 59 nt, synthetic construct
  source 1..59: mol_type = other RNA
aaataaataaataaaaaaaaaaaaaaaaaaataaataaataaataaataaataaatata

SEQ ID NO: 9895 - RNA, 59 nt, synthetic construct
  source 1..59: mol_type = other RNA
aaataaataaaaaaaaaaaaaaaaaaataaataaataaataaataaataaataaatata

SEQ ID NO: 9896 - RNA, 59 nt, synthetic construct
  source 1..59: mol_type = other RNA
aaaaaaaaaaaaaaaaaaaaaaaaaaaaaaaaaaaaaaaataaataaataaataaataa

SEQ ID NO: 9897 - RNA, 59 nt, synthetic construct
  source 1..59: mol_type = other RNA
aaataaataaaaaaaaaaaaaaataaataaataaataaataaataaataaataaatata

SEQ ID NO: 9898 - RNA, 59 nt, synthetic construct
  source 1..59: mol_type = other RNA
aaataaataaataaaaaaaaaaaaaaataaataaataaataaataaataaataaatata

SEQ ID NO: 9899 - RNA, 59 nt, synthetic construct
  source 1..59: mol_type = other RNA
aaaaaaaaaaaaaaaaaaaaaaaaaaaaaaaaaaaaaaaaaaaaaaataaataaataaa

SEQ ID NO: 9900 - RNA, 59 nt, synthetic construct
  source 1..59: mol_type = other RNA
aaaaaaaaaaaaaaaaaaaaaaaaaaaaaaaaaaaataaataaataaataaataaataa

SEQ ID NO: 9901 - RNA, 59 nt, synthetic construct
  source 1..59: mol_type = other RNA
aaataaataaataaaaaaaaaaataaataaataaataaataaataaataaataaatata

SEQ ID NO: 9902 - RNA, 59 nt, synthetic construct
  source 1..59: mol_type = other RNA
aaaaaaaaaaaaaaaaaaaaaaaaaaaaaaaaaaaaaaaaaaataaataaataaataaa

SEQ ID NO: 9903 - RNA, 59 nt, synthetic construct
  source 1..59: mol_type = other RNA
aaaaaaaaaaaaaaaaaaaaaaaaaaaaaaaataaataaataaataaataaataaataa

SEQ ID NO: 9904 - RNA, 59 nt, synthetic construct
  source 1..59: mol_type = other RNA
aaaaaaaaaaaaaaaaaaaaaaaaaaaaaaaaaaaaaaataaataaataaataaataaa

SEQ ID NO: 9905 - RNA, 59 nt, synthetic construct
  source 1..59: mol_type = other RNA
aaaaaaaaaaaaaaaaaaaaaaaaaaaaaaaaaaataaataaataaataaataaataaa

SEQ ID NO: 9906 - RNA, 59 nt, synthetic construct
  source 1..59: mol_type = other RNA
aaaaaaaaaaaaaaaaaaaaaaaaaaaaaaaaaaaaaaaaaaaaaaaaaaaaaaaatat

SEQ ID NO: 9907 - RNA, 59 nt, synthetic construct
  source 1..59: mol_type = other RNA
aaaaaaaaaaaaaaaaaaaaaaaaaaaaaaaaaaaaaaaaaaaaaaaaaaaataaatat

SEQ ID NO: 9908 - RNA, 59 nt, synthetic construct
  source 1..59: mol_type = other RNA
aaaaaaaaaaaaaaaaaaaaaaaaaaaaaaaaaaaaaaaaaaaaaaaataaataaatat

SEQ ID NO: 9909 - RNA, 59 nt, synthetic construct
  source 1..59: mol_type = other RNA
aaaaaaaaaaaaaaaaaaaaaaaaaaaaaaaaaaaaaaaaaaaataaataaataaatat

SEQ ID NO: 9910 - RNA, 59 nt, synthetic construct
  source 1..59: mol_type = other RNA
aaaaaaaaaaaaaaaaaaaaaaaaaaaaaaaaaaaaaaaataaataaataaataaatat

SEQ ID NO: 9911 - RNA, 59 nt, synthetic construct
  source 1..59: mol_type = other RNA
aaaaaaaaaaaaaaaaaaaaaaaaaaaaaaaaaaaaaaaaaaaaaaaaaaaaaaaaata

SEQ ID NO: 9912 - RNA, 59 nt, synthetic construct
  source 1..59: mol_type = other RNA
aaaaaaaaaaaaaaaaaaaaaaaaaaaaaaaaaaaaaaataaatataaatataaatata

SEQ ID NO: 9913 - RNA, 59 nt, synthetic construct
  source 1..59: mol_type = other RNA
aaaaaaaaaaaaaaaaaaaaaaaaaaaaaaaaaaataaataaatataaatataaatata

SEQ ID NO: 9914 - RNA, 59 nt, synthetic construct
  source 1..59: mol_type = other RNA
aaaaaaaaaaaaaaaaaaaaaaaaaaaaaaaaaaatataaatataaataaataaatata

SEQ ID NO: 9915 - RNA, 59 nt, synthetic construct
  source 1..59: mol_type = other RNA
aaaaaaaaaaaaaaaaaaaaaaaaaaaaaaaaaaatataaataaatataaataaatata

SEQ ID NO: 9916 - RNA, 59 nt, synthetic construct
  source 1..59: mol_type = other RNA
aaaaaaaaaaaaaaaaaaaaaaaaaaaaaaataaataaataaatataaatataaatata

SEQ ID NO: 9917 - RNA, 59 nt, synthetic construct
  source 1..59: mol_type = other RNA
aaaaaaaaaaaaaaaaaaaaaaaaaaaaaaataaataaatataaatataaataaatata

SEQ ID NO: 9918 - RNA, 59 nt, synthetic construct
  source 1..59: mol_type = other RNA
aaaaaaaaaaaaaaaaaaaaaaaaaaatataaataaataaatataaataaataaatata

SEQ ID NO: 9919 - RNA, 59 nt, synthetic construct
  source 1..59: mol_type = other RNA
aaaaaaaaaaaaaaaaaaaaaaaaaaataaataaataaatataaatataaataaatata

SEQ ID NO: 9920 - RNA, 59 nt, synthetic construct
  source 1..59: mol_type = other RNA
aaaaaaaaaaaaaaaaaaatataaataaataaataaataaataaatataaataaatata

SEQ ID NO: 9921 - RNA, 59 nt, synthetic construct
  source 1..59: mol_type = other RNA
aaataaaaaaaaaaaaaaaaaaaaaaaaaaaaaaaaaaaaatataaataaataaatata

SEQ ID NO: 9922 - RNA, 59 nt, synthetic construct
  source 1..59: mol_type = other RNA
aaataaaaaaaaaaaaaaaaaaaaaaaaaaaaaaaaaaaaataaatataaataaatata

SEQ ID NO: 9923 - RNA, 59 nt, synthetic construct
  source 1..59: mol_type = other RNA
aaataaaaaaaaaaaaaaaaaaaaaaaaaaaaaaaaataaataaatataaataaatata

SEQ ID NO: 9924 - RNA, 59 nt, synthetic construct
  source 1..59: mol_type = other RNA
aaataaaaaaaaaaaaaaaaaaaaaaaaaaaaaaaaataaatataaataaataaatata

SEQ ID NO: 9925 - RNA, 59 nt, synthetic construct
  source 1..59: mol_type = other RNA
aaataaataaatataaataaataaaaaaaaaaaaaaaaaaaaaaaaaaaaaaaaatata

SEQ ID NO: 9926 - RNA, 59 nt, synthetic construct
  source 1..59: mol_type = other RNA
aaataaataaaaaaaaaaaaaaaaaaaaaaaaaaaaaaaaataaatataaataaatata

SEQ ID NO: 9927 - RNA, 59 nt, synthetic construct
  source 1..59: mol_type = other RNA
aaaaaaaaaaaaaaaaaaaaaaaaaaaaaaaaaaaaaaaaaaaaaaaaaaaaaatataa

SEQ ID NO: 9928 - RNA, 59 nt, synthetic construct
  source 1..59: mol_type = other RNA
aaataaaaaaaaaaaaaaaaaaaaaaaaaaaaataaataaatataaataaataaatata

SEQ ID NO: 9929 - RNA, 59 nt, synthetic construct
  source 1..59: mol_type = other RNA
aaataaataaaaaaaaaaaaaaaaaaaaaaaaaaaaataaataaataaatataaatata

SEQ ID NO: 9930 - RNA, 59 nt, synthetic construct
  source 1..59: mol_type = other RNA
aaataaaaaaaaaaaaaaaaaaaaaaaaaaaaataaataaataaataaatataaatata

SEQ ID NO: 9931 - RNA, 59 nt, synthetic construct
  source 1..59: mol_type = other RNA
aaataaataaaaaaaaaaaaaaaaaaaaaaaaaaaaataaatataaataaataaatata

SEQ ID NO: 9932 - RNA, 59 nt, synthetic construct
  source 1..59: mol_type = other RNA
aaataaataaaaaaaaaaaaaaaaaaaaaaaaaaaaataaataaatataaataaatata

SEQ ID NO: 9933 - RNA, 59 nt, synthetic construct
  source 1..59: mol_type = other RNA
aaataaataaatataaataaataaataaaaaaaaaaaaaaaaaaaaaaaaaaaaatata

SEQ ID NO: 9934 - RNA, 59 nt, synthetic construct
  source 1..59: mol_type = other RNA
aaataaataaatataaataaataaaaaaaaaaaaaaaaaaaaaaaaaaaaataaatata

SEQ ID NO: 9935 - RNA, 59 nt, synthetic construct
  source 1..59: mol_type = other RNA
aaataaataaataaaaaaaaaaaaaaaaaaaaaaaaaaaaataaatataaataaatata

SEQ ID NO: 9936 - RNA, 59 nt, synthetic construct
  source 1..59: mol_type = other RNA
aaaaaaaaaaaaaaaaaaaaaaaaaaaaaaaaaaaaaaaaaaaaaaaaaataaatataa

SEQ ID NO: 9937 - RNA, 59 nt, synthetic construct
  source 1..59: mol_type = other RNA
aaataaataaaaaaaaaaaaaaaaaaaaaaaaatataaataaataaataaataaatata

SEQ ID NO: 9938 - RNA, 59 nt, synthetic construct
  source 1..59: mol_type = other RNA
aaataaataaaaaaaaaaaaaaaaaaaaaaaaataaatataaataaataaataaatata

SEQ ID NO: 9939 - RNA, 59 nt, synthetic construct
  source 1..59: mol_type = other RNA
aaataaataaataaaaaaaaaaaaaaaaaaaaaaaaatataaataaataaataaatata

SEQ ID NO: 9940 - RNA, 59 nt, synthetic construct
  source 1..59: mol_type = other RNA
aaataaataaaaaaaaaaaaaaaaaaaaaaaaataaataaataaataaatataaatata

SEQ ID NO: 9941 - RNA, 59 nt, synthetic construct
  source 1..59: mol_type = other RNA
aaataaataaaaaaaaaaaaaaaaaaaaaaaaataaataaatataaataaataaatata

SEQ ID NO: 9942 - RNA, 59 nt, synthetic construct
  source 1..59: mol_type = other RNA
aaataaataaataaaaaaaaaaaaaaaaaaaaaaaaataaataaataaatataaatata

SEQ ID NO: 9943 - RNA, 59 nt, synthetic construct
  source 1..59: mol_type = other RNA
aaataaataaataaaaaaaaaaaaaaaaaaaaaaaaataaatataaataaataaatata

SEQ ID NO: 9944 - RNA, 59 nt, synthetic construct
  source 1..59: mol_type = other RNA
aaataaataaataaaaaaaaaaaaaaaaaaaaaaaaataaataaatataaataaatata

SEQ ID NO: 9945 - RNA, 59 nt, synthetic construct
  source 1..59: mol_type = other RNA
aaataaataaatataaataaataaataaataaaaaaaaaaaaaaaaaaaaaaaaatata

SEQ ID NO: 9946 - RNA, 59 nt, synthetic construct
  source 1..59: mol_type = other RNA
aaataaataaatataaataaataaataaaaaaaaaaaaaaaaaaaaaaaaataaatata

SEQ ID NO: 9947 - RNA, 59 nt, synthetic construct
  source 1..59: mol_type = other RNA
aaataaataaataaataaaaaaaaaaaaaaaaaaaaaaaaataaatataaataaatata

SEQ ID NO: 9948 - RNA, 59 nt, synthetic construct
  source 1..59: mol_type = other RNA
aaaaaaaaaaaaaaaaaaaaaaaaaaaaaaaaaaaaaaatatataaataaataaatata

SEQ ID NO: 9949 - RNA, 59 nt, synthetic construct
  source 1..59: mol_type = other RNA
aaaaaaaaaaaaaaaaaaaaaaaaaaaaaaaaaaaaaaaaaaaaaataaataaatataa

SEQ ID NO: 9950 - RNA, 59 nt, synthetic construct
  source 1..59: mol_type = other RNA
aaataaataaaaaaaaaaaaaaaaaaaaataaatataaataaataaataaataaatata

SEQ ID NO: 9951 - RNA, 59 nt, synthetic construct
  source 1..59: mol_type = other RNA
aaataaataaataaaaaaaaaaaaaaaaaaaaataaatataaataaataaataaatata

SEQ ID NO: 9952 - RNA, 59 nt, synthetic construct
  source 1..59: mol_type = other RNA
aaataaataaaaaaaaaaaaaaaaaaaaataaataaatataaataaataaataaatata

SEQ ID NO: 9953 - RNA, 59 nt, synthetic construct
  source 1..59: mol_type = other RNA
aaataaataaataaaaaaaaaaaaaaaaaaaaatataaataaataaataaataaatata

SEQ ID NO: 9954 - RNA, 59 nt, synthetic construct
  source 1..59: mol_type = other RNA
aaataaataaataaaaaaaaaaaaaaaaaaaaataaataaataaataaatataaatata

SEQ ID NO: 9955 - RNA, 59 nt, synthetic construct
  source 1..59: mol_type = other RNA
aaataaataaataaaaaaaaaaaaaaaaaaaaataaataaatataaataaataaatata

SEQ ID NO: 9956 - RNA, 59 nt, synthetic construct
  source 1..59: mol_type = other RNA
aaataaataaataaaaaaaaaaaaaaaaaaaaataaataaataaatataaataaatata

SEQ ID NO: 9957 - RNA, 59 nt, synthetic construct
  source 1..59: mol_type = other RNA
aaataaataaatataaataaataaataaataaataaaaaaaaaaaaaaaaaaaaatata

SEQ ID NO: 9958 - RNA, 59 nt, synthetic construct
  source 1..59: mol_type = other RNA
aaataaataaatataaataaataaataaataaaaaaaaaaaaaaaaaaaaataaatata

SEQ ID NO: 9959 - RNA, 59 nt, synthetic construct
  source 1..59: mol_type = other RNA
aaataaataaataaataaaaaaaaaaaaaaaaaaaaataaataaatataaataaatata

SEQ ID NO: 9960 - RNA, 59 nt, synthetic construct
  source 1..59: mol_type = other RNA
aaaaaaaaaaaaaaaaaaaaaaaaaaaaaaaaaaataaataaatataaataaatatata

SEQ ID NO: 9961 - RNA, 59 nt, synthetic construct
  source 1..59: mol_type = other RNA
aaaaaaaaaaaaaaaaaaaaaaaaaaaaaaaaaaataaatatataaataaataaatata

SEQ ID NO: 9962 - RNA, 59 nt, synthetic construct
  source 1..59: mol_type = other RNA
aaaaaaaaaaaaaaaaaaaaaaaaaaaaaaaaaaaaaaaaaataaataaataaatataa

SEQ ID NO: 9963 - RNA, 59 nt, synthetic construct
  source 1..59: mol_type = other RNA
aaaaaaaaaaaaaaaaaaaaaaaaaaaaaaaaaaaaaaaaaataaataaatataaataa

SEQ ID NO: 9964 - RNA, 59 nt, synthetic construct
  source 1..59: mol_type = other RNA
aaaaaaaaaaaaaaaaaaaaaaaaaaaaaaaaaaaaaaaaaataaatataaataaataa

SEQ ID NO: 9965 - RNA, 59 nt, synthetic construct
  source 1..59: mol_type = other RNA
aaataaataaaaaaaaaaaaaaaaataaataaatataaataaataaataaataaatata

SEQ ID NO: 9966 - RNA, 59 nt, synthetic construct
  source 1..59: mol_type = other RNA
aaataaataaataaaaaaaaaaaaaaaaataaataaatataaataaataaataaatata

SEQ ID NO: 9967 - RNA, 59 nt, synthetic construct
  source 1..59: mol_type = other RNA
aaataaataaataaaaaaaaaaaaaaaaataaatataaataaataaataaataaatata

SEQ ID NO: 9968 - RNA, 59 nt, synthetic construct
  source 1..59: mol_type = other RNA
aaataaataaataaaaaaaaaaaaaaaaatataaataaataaataaataaataaatata

SEQ ID NO: 9969 - RNA, 59 nt, synthetic construct
  source 1..59: mol_type = other RNA
aaataaaaaaaaaaaaaaaaataaataaatataaataaataaataaataaataaatata

SEQ ID NO: 9970 - RNA, 59 nt, synthetic construct
  source 1..59: mol_type = other RNA
aaataaataaatataaataaataaataaataaataaaaaaaaaaaaaaaaataaatata

SEQ ID NO: 9971 - RNA, 60 nt, synthetic construct
  source 1..60: mol_type = other RNA
aaaaaaaaaaaaaaaaaaaaaaaaaaaaaaaaaaaaaaaaaaaaaaaaaaaaaaaatata

SEQ ID NO: 9972 - RNA, 60 nt, synthetic construct
  source 1..60: mol_type = other RNA
aaaaaaaaaaaaaaaaaaaaaaaaaaaaaaaaaaaaaaaaaaaaaaaaaaaataaatata

SEQ ID NO: 9973 - RNA, 60 nt, synthetic construct
  source 1..60: mol_type = other RNA
aaaaaaaaaaaaaaaaaaaaaaaaaaaaaaaaaaaaaaaaaaaaaaaataaataaatata

SEQ ID NO: 9974 - RNA, 60 nt, synthetic construct
  source 1..60: mol_type = other RNA
aaaaaaaaaaaaaaaaaaaaaaaaaaaaaaaaaaaaaaaaaaaaaaaaaatataaatata

SEQ ID NO: 9975 - RNA, 60 nt, synthetic construct
  source 1..60: mol_type = other RNA
aaaaaaaaaaaaaaaaaaaaaaaaaaaaaaaaaaaaaaaaaaaaaataaatataaatata

SEQ ID NO: 9976 - RNA, 60 nt, synthetic construct
  source 1..60: mol_type = other RNA
aaaaaaaaaaaaaaaaaaaaaaaaaaaaaaaaaaaaaaaaaaaaaatataaataaatata

SEQ ID NO: 9977 - RNA, 60 nt, synthetic construct
  source 1..60: mol_type = other RNA
aaaaaaaaaaaaaaaaaaaaaaaaaaaaaaaaaaaaaaaaaataaataaatataaatata

SEQ ID NO: 9978 - RNA, 60 nt, synthetic construct
  source 1..60: mol_type = other RNA
aaaaaaaaaaaaaaaaaaaaaaaaaaaaaaaaaaaaaataaatataaataaataaatata

SEQ ID NO: 9979 - RNA, 60 nt, synthetic construct
  source 1..60: mol_type = other RNA
aaataaaaaaaaaaaaaaaaaaaaaaaaaaaaaaaaaaaaaaaaaaaaaaaaaaaatata

SEQ ID NO: 9980 - RNA, 60 nt, synthetic construct
  source 1..60: mol_type = other RNA
aaataaataaaaaaaaaaaaaaaaaaaaaaaaaaaaaaaaaaaaaaaaaaaaaaaatata

SEQ ID NO: 9981 - RNA, 60 nt, synthetic construct
  source 1..60: mol_type = other RNA
aaataaaaaaaaaaaaaaaaaaaaaaaaaaaaaaaaaaaaaaaaaaaaaaaataaatata

SEQ ID NO: 9982 - RNA, 60 nt, synthetic construct
  source 1..60: mol_type = other RNA
aaataaataaaaaaaaaaaaaaaaaaaaaaaaaaaaaaaaaaaaaaaaaaaataaatata

SEQ ID NO: 9983 - RNA, 60 nt, synthetic construct
  source 1..60: mol_type = other RNA
aaataaaaaaaaaaaaaaaaaaaaaaaaaaaaaaaaaaaaaaaaaaaataaataaatata

SEQ ID NO: 9984 - RNA, 60 nt, synthetic construct
  source 1..60: mol_type = other RNA
aaataaataaaaaaaaaaaaaaaaaaaaaaaaaaaaaaaaaaaaaaaataaataaatata

SEQ ID NO: 9985 - RNA, 60 nt, synthetic construct
  source 1..60: mol_type = other RNA
aaataaaaaaaaaaaaaaaaaaaaaaaaaaaaaaaaaaaaaaaataaataaataaatata

SEQ ID NO: 9986 - RNA, 60 nt, synthetic construct
  source 1..60: mol_type = other RNA
aaaaaaaaaaaaaaaaaaaaaaaaaaaaaaaaaaaaaaaaaaaaaaaaaaaaaatatata

SEQ ID NO: 9987 - RNA, 60 nt, synthetic construct
  source 1..60: mol_type = other RNA
aaataaataaaaaaaaaaaaaaaaaaaaaaaaaaaaaaaaaaaataaataaataaatata

SEQ ID NO: 9988 - RNA, 60 nt, synthetic construct
  source 1..60: mol_type = other RNA
aaataaaaaaaaaaaaaaaaaaaaaaaaaaaaaaaaaaaataaataaataaataaatata

SEQ ID NO: 9989 - RNA, 60 nt, synthetic construct
  source 1..60: mol_type = other RNA
aaaaaaaaaaaaaaaaaaaaaaaaaaaaaaaaaaaaaaaaaaaaaaaaaataaatatata

SEQ ID NO: 9990 - RNA, 60 nt, synthetic construct
  source 1..60: mol_type = other RNA
aaaaaaaaaaaaaaaaaaaaaaaaaaaaaaaaaaaaaaaaaaaaaaaaaaaaaaaaataa

SEQ ID NO: 9991 - RNA, 60 nt, synthetic construct
  source 1..60: mol_type = other RNA
aaataaataaaaaaaaaaaaaaaaaaaaaaaaaaaaaaaataaataaataaataaatata

SEQ ID NO: 9992 - RNA, 60 nt, synthetic construct
  source 1..60: mol_type = other RNA
aaaaaaaaaaaaaaaaaaaaaaaaaaaaaaaaaaaaaaaaaaaaaaaaaaaaataaataa

SEQ ID NO: 9993 - RNA, 60 nt, synthetic construct
  source 1..60: mol_type = other RNA
aaaaaaaaaaaaaaaaaaaaaaaaaaaaaaaaaaaaaaaaaaaaaaaaaaaaaaaataaa

SEQ ID NO: 9994 - RNA, 60 nt, synthetic construct
  source 1..60: mol_type = other RNA
aaaaaaaaaaaaaaaaaaaaaaaaaaaaaaaaaaaaaaaaaaaaaaaaaaaataaataaa

SEQ ID NO: 9995 - RNA, 60 nt, synthetic construct
  source 1..60: mol_type = other RNA
aaaaaaaaaaaaaaaaaaaaaaaaaaaaaaaaaaaaaaaaaaaatataaatataaatata

SEQ ID NO: 9996 - RNA, 60 nt, synthetic construct
  source 1..60: mol_type = other RNA
aaaaaaaaaaaaaaaaaaaaaaaaaaaaaaaaaaaaaaaaaaaaaaaaaataaataaata

SEQ ID NO: 9997 - RNA, 60 nt, synthetic construct
  source 1..60: mol_type = other RNA
aaaaaaaaaaaaaaaaaaaaaaaaaaaaaaaaaaaatataaatataaataaataaatata

SEQ ID NO: 9998 - RNA, 60 nt, synthetic construct
  source 1..60: mol_type = other RNA
aaaaaaaaaaaaaaaaaaaaaaaaaaaaaaaataaatataaatataaataaataaatata

SEQ ID NO: 9999 - RNA, 60 nt, synthetic construct
  source 1..60: mol_type = other RNA
aaaaaaaaaaaaaaaaaaaaaaaaaaaaaaaataaataaataaatataaatataaatata

SEQ ID NO: 10000 - RNA, 60 nt, synthetic construct
  source 1..60: mol_type = other RNA
aaaaaaaaaaaaaaaaaaaaaaaaaaaataaataaataaataaatataaatataaatata

SEQ ID NO: 10001 - RNA, 60 nt, synthetic construct
  source 1..60: mol_type = other RNA
aaataaaaaaaaaaaaaaaaaaaaaaaaaaaaaaaaaaaaaaaaaaaaaatataaatata

SEQ ID NO: 10002 - RNA, 60 nt, synthetic construct
  source 1..60: mol_type = other RNA
aaaaaaaaaaaaaaaaaaaaaaaataaataaataaataaataaatataaatataaatata

SEQ ID NO: 10003 - RNA, 60 nt, synthetic construct
  source 1..60: mol_type = other RNA
aaataaataaaaaaaaaaaaaaaaaaaaaaaaaaaaaaaaaaaaaaaaaatataaatata

SEQ ID NO: 10004 - RNA, 60 nt, synthetic construct
  source 1..60: mol_type = other RNA
aaataaataaataaatataaaaaaaaaaaaaaaaaaaaaaaaaaaaaaaaaataaatata

SEQ ID NO: 10005 - RNA, 60 nt, synthetic construct
  source 1..60: mol_type = other RNA
aaataaaaaaaaaaaaaaaaaaaaaaaaaaaaaaaaaatataaataaataaataaatata

SEQ ID NO: 10006 - RNA, 60 nt, synthetic construct
  source 1..60: mol_type = other RNA
aaataaataaataaatataaaaaaaaaaaaaaaaaaaaaaaaaaaaaataaataaatata

SEQ ID NO: 10007 - RNA, 60 nt, synthetic construct
  source 1..60: mol_type = other RNA
aaataaataaataaatataaataaaaaaaaaaaaaaaaaaaaaaaaaaaaaataaatata

SEQ ID NO: 10008 - RNA, 60 nt, synthetic construct
  source 1..60: mol_type = other RNA
aaataaaaaaaaaaaaaaaaaaaaaaaaaaaaaataaatataaataaataaataaatata

SEQ ID NO: 10009 - RNA, 60 nt, synthetic construct
  source 1..60: mol_type = other RNA
aaataaataaaaaaaaaaaaaaaaaaaaaaaaaaaaaatataaataaataaataaatata

SEQ ID NO: 10010 - RNA, 60 nt, synthetic construct
  source 1..60: mol_type = other RNA
aaataaaaaaaaaaaaaaaaaaaaaaaaaaaaaatataaataaataaataaataaatata

SEQ ID NO: 10011 - RNA, 60 nt, synthetic construct
  source 1..60: mol_type = other RNA
aaataaataaataaatataaataaataaaaaaaaaaaaaaaaaaaaaaaaaataaatata

SEQ ID NO: 10012 - RNA, 60 nt, synthetic construct
  source 1..60: mol_type = other RNA
aaataaataaataaatataaaaaaaaaaaaaaaaaaaaaaaaaataaataaataaatata

SEQ ID NO: 10013 - RNA, 60 nt, synthetic construct
  source 1..60: mol_type = other RNA
aaataaataaataaatataaataaaaaaaaaaaaaaaaaaaaaaaaaataaataaatata

SEQ ID NO: 10014 - RNA, 60 nt, synthetic construct
  source 1..60: mol_type = other RNA
aaataaataaaaaaaaaaaaaaaaaaaaaaaaaatataaataaataaataaataaatata

SEQ ID NO: 10015 - RNA, 60 nt, synthetic construct
  source 1..60: mol_type = other RNA
aaataaataaaaaaaaaaaaaaaaaaaaaaaaaataaatataaataaataaataaatata

SEQ ID NO: 10016 - RNA, 60 nt, synthetic construct
  source 1..60: mol_type = other RNA
aaaaaaaaaaaaaaaaaaaaaaaaaaaaaaaaaaaaaaaaaaaaaaatataaataaataa

SEQ ID NO: 10017 - RNA, 60 nt, synthetic construct
  source 1..60: mol_type = other RNA
aaataaataaataaatataaataaaaaaaaaaaaaaaaaaaaaataaataaataaatata

SEQ ID NO: 10018 - RNA, 60 nt, synthetic construct
  source 1..60: mol_type = other RNA
aaataaataaataaatataaataaataaaaaaaaaaaaaaaaaaaaaataaataaatata

SEQ ID NO: 10019 - RNA, 60 nt, synthetic construct
  source 1..60: mol_type = other RNA
aaaaaaaaaaaaaaaaaaaaaaaaaaaaaaaaaaaaaaaaaaaaaaaaaaaaaatataaa

SEQ ID NO: 10020 - RNA, 60 nt, synthetic construct
  source 1..60: mol_type = other RNA
aaaaaaaaaaaaaaaaaaaaaaaaaaaaaaaaaaaaaaaaaaataaatataaataaataa

SEQ ID NO: 10021 - RNA, 60 nt, synthetic construct
  source 1..60: mol_type = other RNA
aaataaataaataaatataaataaataaaaaaaaaaaaaaaaaataaataaataaatata

SEQ ID NO: 10022 - RNA, 60 nt, synthetic construct
  source 1..60: mol_type = other RNA
aaaaaaaaaaaaaaaaaaaaaaaaaaaaaaaatataaataaataaataaataaatatata

SEQ ID NO: 10023 - RNA, 60 nt, synthetic construct
  source 1..60: mol_type = other RNA
aaaaaaaaaaaaaaaaaaaaaaaaaaaaaaaataaataaataaataaatataaatatata

SEQ ID NO: 10024 - RNA, 60 nt, synthetic construct
  source 1..60: mol_type = other RNA
aaaaaaaaaaaaaaaaaaaaaaaaaaaaaaaataaataaataaataaatatataaatata

SEQ ID NO: 10025 - RNA, 60 nt, synthetic construct
  source 1..60: mol_type = other RNA
aaaaaaaaaaaaaaaaaaaaaaaaaaaaaaaataaataaataaatataaataaatatata

SEQ ID NO: 10026 - RNA, 60 nt, synthetic construct
  source 1..60: mol_type = other RNA
aaaaaaaaaaaaaaaaaaaaaaaaaaaaaaaaaaaaaaaaaaaaaaaaaataaatataaa

SEQ ID NO: 10027 - RNA, 60 nt, synthetic construct
  source 1..60: mol_type = other RNA
aaataaaaaaaaaaaaaaaaaaaaaaaaaaaaaaaaaaaaaaaaaaaaaaaaaatatata

SEQ ID NO: 10028 - RNA, 60 nt, synthetic construct
  source 1..60: mol_type = other RNA
aaaaaaaaaaaaaaaaaaaaaaaaaaaataaatataaataaataaataaataaatatata

SEQ ID NO: 10029 - RNA, 60 nt, synthetic construct
  source 1..60: mol_type = other RNA
aaaaaaaaaaaaaaaaaaaaaaaaaaaataaataaataaataaataaatatataaatata

SEQ ID NO: 10030 - RNA, 60 nt, synthetic construct
  source 1..60: mol_type = other RNA
aaaaaaaaaaaaaaaaaaaaaaaaaaaataaataaataaataaataaatataaatatata

SEQ ID NO: 10031 - RNA, 60 nt, synthetic construct
  source 1..60: mol_type = other RNA
aaaaaaaaaaaaaaaaaaaaaaaaaaaataaataaataaataaatataaataaatatata

SEQ ID NO: 10032 - RNA, 60 nt, synthetic construct
  source 1..60: mol_type = other RNA
aaaaaaaaaaaaaaaaaaaaaaaaaaaaaaaaaaaaaaaaaaaaaataaataaatataaa

SEQ ID NO: 10033 - RNA, 60 nt, synthetic construct
  source 1..60: mol_type = other RNA
aaaaaaaaaaaaaaaaaaaaaaaaaaaaaaaaaaaaaaaaaaaaaataaatataaataaa

SEQ ID NO: 10034 - RNA, 60 nt, synthetic construct
  source 1..60: mol_type = other RNA
aaaaaaaaaaaaaaaaaaaaaaaataaataaataaataaataaataaatataaatatata

SEQ ID NO: 10035 - RNA, 60 nt, synthetic construct
  source 1..60: mol_type = other RNA
aaaaaaaaaaaaaaaaaaaaaaaataaataaataaataaataaataaatatataaatata

SEQ ID NO: 10036 - RNA, 60 nt, synthetic construct
  source 1..60: mol_type = other RNA
aaataaaaaaaaaaaaaaaaaaaaaaaaaaaaaaaaaaaaaaaaaaaaaaaaaaaaataa

SEQ ID NO: 10037 - RNA, 60 nt, synthetic construct
  source 1..60: mol_type = other RNA
aaataaataaaaaaaaaaaaaaaaaaaaaaaaaaaaaaaaaaaaaaaaaaaaaaaaataa

SEQ ID NO: 10038 - RNA, 60 nt, synthetic construct
  source 1..60: mol_type = other RNA
aaataaaaaaaaaaaaaaaaaaaaaaaaaaaaaaaaaaaaaaaaaaaaaaaaataaataa

SEQ ID NO: 10039 - RNA, 60 nt, synthetic construct
  source 1..60: mol_type = other RNA
aaaaaaaaaaaaaaaaaaaaaaaaaaaaaaaaaaaaaaaaaaaaaaaaaaaatatatata

SEQ ID NO: 10040 - RNA, 60 nt, synthetic construct
  source 1..60: mol_type = other RNA
aaataaataaaaaaaaaaaaaaaaaaaaaaaaaaaaaaaaaaaaaaaaaaaaataaataa

SEQ ID NO: 10041 - RNA, 60 nt, synthetic construct
  source 1..60: mol_type = other RNA
aaataaataaataaaaaaaaaaaaaaaaaaaaaaaaaaaaaaaaaaaaaaaaaaaaataa

SEQ ID NO: 10042 - RNA, 60 nt, synthetic construct
  source 1..60: mol_type = other RNA
aaaaaaaaaaaaaaaaaaaaaaaaaaaaaaaaaaaaaaaaaaaaaaaataaatatatata

SEQ ID NO: 10043 - RNA, 60 nt, synthetic construct
  source 1..60: mol_type = other RNA
aaataaaaaaaaaaaaaaaaaaaaaaaaaaaaaaaaaaaaaaaaaaaaaaaaaaaataaa

SEQ ID NO: 10044 - RNA, 60 nt, synthetic construct
  source 1..60: mol_type = other RNA
aaataaataaataaaaaaaaaaaaaaaaaaaaaaaaaaaaaaaaaaaaaaaaataaataa

SEQ ID NO: 10045 - RNA, 60 nt, synthetic construct
  source 1..60: mol_type = other RNA
aaataaataaataaataaaaaaaaaaaaaaaaaaaaaaaaaaaaaaaaaaaaaaaaataa

SEQ ID NO: 10046 - RNA, 60 nt, synthetic construct
  source 1..60: mol_type = other RNA
aaaaaaaaaaaaaaaaaaataaataaataaataaatataaataaataaataaataaataa

SEQ ID NO: 10047 - RNA, 60 nt, synthetic construct
  source 1..60: mol_type = other RNA
aaataaataaaaaaaaaaaaaaaaaaaaaaaaaaaaaaaaaaaaaaaaaaaaaaaataaa

SEQ ID NO: 10048 - RNA, 60 nt, synthetic construct
  source 1..60: mol_type = other RNA
aaataaaaaaaaaaaaaaaaaaaaaaaaaaaaaaaaaaaaaaaaaaaaaaaataaataaa

SEQ ID NO: 10049 - RNA, 60 nt, synthetic construct
  source 1..60: mol_type = other RNA
aaaaaaaaaaaaaaataaataaataaataaataaatataaataaataaataaataaataa

SEQ ID NO: 10050 - RNA, 60 nt, synthetic construct
  source 1..60: mol_type = other RNA
aaataaataaaaaaaaaaaaaaaaaaaaaaaaaaaaaaaaaaaaaaaaaaaataaataaa

SEQ ID NO: 10051 - RNA, 60 nt, synthetic construct
  source 1..60: mol_type = other RNA
aaaaaaaaaaataaataaataaataaataaataaatataaataaataaataaataaataa

SEQ ID NO: 10052 - RNA, 60 nt, synthetic construct
  source 1..60: mol_type = other RNA
aaaaaaaaaaaaaaaaaaaaaaaaaaaaaaaaaaaaaaaaaaaaaaaaaaaaaaaataat

SEQ ID NO: 10053 - RNA, 60 nt, synthetic construct
  source 1..60: mol_type = other RNA
aaaaaaaaaaaaaaaaaaaaataaaaaaaaaaaaaaaaaaaaaaaaaaaaaaaaaatata

SEQ ID NO: 10054 - RNA, 60 nt, synthetic construct
  source 1..60: mol_type = other RNA
aaaaaaaaaaaaaaaaaaaaaaaaaaaaaaaaaaaaaaaataaaaaaaaaaaaaaatata

SEQ ID NO: 10055 - RNA, 60 nt, synthetic construct
  source 1..60: mol_type = other RNA
aaaaaaaaaaaaaaaaaaaaaaaaaaaaaaaaaaaaaaataaaaaaaaaaaaaaaatata

SEQ ID NO: 10056 - RNA, 60 nt, synthetic construct
  source 1..60: mol_type = other RNA
aaaaaaaaaaaataaaaaaaaaaaaaaaaaaaaaaaaaaaaaaaaaaaaaaaaaaatata

SEQ ID NO: 10057 - RNA, 60 nt, synthetic construct
  source 1..60: mol_type = other RNA
aaaaaaaaaaaaaaaaaaaaaataaaaaaaaaaaaaaaaaaaaaaaaaaaaaaaaatata

SEQ ID NO: 10058 - RNA, 60 nt, synthetic construct
  source 1..60: mol_type = other RNA
aaaaaaaaaaaaaaaaaaaaaaaaaaaaaaaaaaaaaaaaataaaaaaaaaaaaaatata

SEQ ID NO: 10059 - RNA, 60 nt, synthetic construct
  source 1..60: mol_type = other RNA
aaataaataaataaataaaaaaaaaaaaaaaaaaaaaaaaaaaaaaaaaaaaaaaaatat

SEQ ID NO: 10060 - RNA, 60 nt, synthetic construct
  source 1..60: mol_type = other RNA
aaaaaaaaaaaaaaaaaaaaaaaaaaaaaaaaataaaaaaaaaaaaaaaaaataaatata

SEQ ID NO: 10061 - RNA, 60 nt, synthetic construct
  source 1..60: mol_type = other RNA
aaaaaaaaaaaaaaaaaaaaaaaaaaaaaaaataaaaaaaaaaaaaaaaaaataaatata

SEQ ID NO: 10062 - RNA, 60 nt, synthetic construct
  source 1..60: mol_type = other RNA
aaaaaaaaaaaaaaaaaaaaaaaaaaaaaaaaaaaataaaaaaaaaaaaaaataaatata

SEQ ID NO: 10063 - RNA, 60 nt, synthetic construct
  source 1..60: mol_type = other RNA
aaaaaaaaaaaaaaaaaaaaaaaaaaaaaaaaaaaaataaaaaaaaaaaaaataaatata

SEQ ID NO: 10064 - RNA, 60 nt, synthetic construct
  source 1..60: mol_type = other RNA
aaaaaaaaaaaaataaaaaaaaaaaaaaaaaaaaaaaaaaaaaaaaaaaaaataaatata

SEQ ID NO: 10065 - RNA, 60 nt, synthetic construct
  source 1..60: mol_type = other RNA
aaaaaaaaaaaaaaaaaaaaaaaaaaaaaaaaaaaaaaaaaaaataaaaaaataaatata

SEQ ID NO: 10066 - RNA, 60 nt, synthetic construct
  source 1..60: mol_type = other RNA
aaaaaaaaaaaaaaaaaataaaaaaaaaaaaaaaaaaaaaaaaaaaaaaaaataaatata

SEQ ID NO: 10067 - RNA, 60 nt, synthetic construct
  source 1..60: mol_type = other RNA
aaaaaaataaaaaaaaaaaaaaaaaaaaaaaaaaaaaaaaaaaaaaaaaaaataaatata

SEQ ID NO: 10068 - RNA, 60 nt, synthetic construct
  source 1..60: mol_type = other RNA
aaaaaaaaaaaaaaaaaaaaaaaaaaaaaaaaaaaaaaaaaaaaataaaaaataaatata

SEQ ID NO: 10069 - RNA, 60 nt, synthetic construct
  source 1..60: mol_type = other RNA
aaaaaaaaaaaaaaaaaaaaaaaataaaaaaaaaaaaaaaaaaaaaaaaaaataaatata

SEQ ID NO: 10070 - RNA, 60 nt, synthetic construct
  source 1..60: mol_type = other RNA
aaaaaaaaaaaaaaaaaaaaaaaaaaaaaaaaaaataaaaaaaaaaaaaaaataaatata

SEQ ID NO: 10071 - RNA, 60 nt, synthetic construct
  source 1..60: mol_type = other RNA
aaaaaaaaaaaaaaaaaaaaaaaaaaaaaaaaaaaataaataaaaaaaaaaaaaaatata

SEQ ID NO: 10072 - RNA, 60 nt, synthetic construct
  source 1..60: mol_type = other RNA
aaataaataaataaataaataaataaataaataaaaaaaaaaaataaataaataaataaa

SEQ ID NO: 10073 - RNA, 60 nt, synthetic construct
  source 1..60: mol_type = other RNA
aaaaaaaaaaaaaaaaaaaaaaaaaaaaaaaaaataaataaaaaaaaaaaaaaaaatata

SEQ ID NO: 10074 - RNA, 60 nt, synthetic construct
  source 1..60: mol_type = other RNA
aaaaaaaaaaaaaaaaaaaaaaaaaaaaaaaaaaaaaaaaaaaaaataaataaaaatata

SEQ ID NO: 10075 - RNA, 60 nt, synthetic construct
  source 1..60: mol_type = other RNA
aaaaaaaaaaaaaaaaaaaaaaaaaaataaaaaaaaaaaaaaaaaaaaaaaataaatata

SEQ ID NO: 10076 - RNA, 60 nt, synthetic construct
  source 1..60: mol_type = other RNA
aaaaaaaaaaaaaaaaaaaaataaaaaaaaaaaaaaaaaaaaaaaaaaaaaataaatata

SEQ ID NO: 10077 - RNA, 60 nt, synthetic construct
  source 1..60: mol_type = other RNA
aaaaaaaaaataaaaaaaaaaaaaaaaaaaaaaaaaaaaaaaaaaaaaaaaataaatata

SEQ ID NO: 10078 - RNA, 60 nt, synthetic construct
  source 1..60: mol_type = other RNA
aaaaaaaaaaaaaaaaaaaaaaaaaaaaaaaaaaaaaaataaaaaaaaaaaataaatata

SEQ ID NO: 10079 - RNA, 60 nt, synthetic construct
  source 1..60: mol_type = other RNA
aaaaaaaaaaaaaaaaaaaaaaaaaaaaaaaaaaaaaataaaaaaaaaaaaataaatata

SEQ ID NO: 10080 - RNA, 60 nt, synthetic construct
  source 1..60: mol_type = other RNA
aaaaaaaaaaaataaaaaaaaaaaaaaaaaaaaaaaaaaaaaaaaaaaaaaataaatata

SEQ ID NO: 10081 - RNA, 60 nt, synthetic construct
  source 1..60: mol_type = other RNA
aaaaaaaaaaaaaaaataaaaaaaaaaaaaaaaaaaaaaaaaaaaaaaaaaataaatata

SEQ ID NO: 10082 - RNA, 60 nt, synthetic construct
  source 1..60: mol_type = other RNA
aaaaaaaaaaaaaaaaaaaaaaaaaaaaaaaaaataaaaaaaaaaaaaaaaataaatata

SEQ ID NO: 10083 - RNA, 60 nt, synthetic construct
  source 1..60: mol_type = other RNA
aaaaaaaaaaaaaaaaaaaaaaaaaaaaaaaaaaaaaaaaaaataaaaaaaataaatata

SEQ ID NO: 10084 - RNA, 60 nt, synthetic construct
  source 1..60: mol_type = other RNA
aaaaaataaaaaaaaaaaaaaaaaaaaaaaaaaaaaaaaaaaaaaaaaaaaataaatata

SEQ ID NO: 10085 - RNA, 60 nt, synthetic construct
  source 1..60: mol_type = other RNA
aaaaaaaaaaaaaaaaaaataaaaaaaaaaaaaaaaaaaaaaaaaaaaaaaataaatata

SEQ ID NO: 10086 - RNA, 60 nt, synthetic construct
  source 1..60: mol_type = other RNA
aaaaaaaaataaaaaaaaaaaaaaaaaaaaaaaaaaaaaaaaaaaaaaaaaataaatata

SEQ ID NO: 10087 - RNA, 60 nt, synthetic construct
  source 1..60: mol_type = other RNA
aaaaaaaaaaaaaaaaaaaaaaaaaaaaaaaaaaaaaaaaaaaaaataaaaataaatata

SEQ ID NO: 10088 - RNA, 60 nt, synthetic construct
  source 1..60: mol_type = other RNA
aaaataaaaaaaaaaaaaaaaaaaaaaaaaaaaaaaaaaaaaaaaaaaaaaataaatata

SEQ ID NO: 10089 - RNA, 60 nt, synthetic construct
  source 1..60: mol_type = other RNA
aaaaaaaaaaaaaaaaaaaaaaaaaaaaaataaaaaaaaaaaaaaaaaaaaataaatata

SEQ ID NO: 10090 - RNA, 61 nt, synthetic construct
  source 1..61: mol_type = other RNA
aaaaaaaaaaaaaaaaaaaaaaaaaaaaaaaaaaaaaaaaaaaaaaaaaaaaaaaaatata

SEQ ID NO: 10091 - RNA, 61 nt, synthetic construct
  source 1..61: mol_type = other RNA
aaataaaaaaaaaaaaaaaaaaaaaaaaaaaaaaaaaaaaaaaaaaaaaaaaaaaaatata

SEQ ID NO: 10092 - RNA, 61 nt, synthetic construct
  source 1..61: mol_type = other RNA
aaataaataaaaaaaaaaaaaaaaaaaaaaaaaaaaaaaaaaaaaaaaaaaaaaaaatata

SEQ ID NO: 10093 - RNA, 61 nt, synthetic construct
  source 1..61: mol_type = other RNA
aaataaataaataaaaaaaaaaaaaaaaaaaaaaaaaaaaaaaaaaaaaaaaaaaaatata

SEQ ID NO: 10094 - RNA, 61 nt, synthetic construct
  source 1..61: mol_type = other RNA
aaaaaaaaaaaaaaaaaaaaaaaaaaaaaaaaaaaaaaaaaaaaaaaaaaaaaaatatata

SEQ ID NO: 10095 - RNA, 61 nt, synthetic construct
  source 1..61: mol_type = other RNA
aaaaaaaaaaaaaaaaaaaaaaaaaaaaaaaaaaaaaaaaaaaaaaaaaaaaaaaaaataa

SEQ ID NO: 10096 - RNA, 61 nt, synthetic construct
  source 1..61: mol_type = other RNA
aaaaaaaaaaaaaaaaaaaaaaaaaaaaaaaaaaaaaaaaaaaaaaaaaaaaaataaataa

SEQ ID NO: 10097 - RNA, 61 nt, synthetic construct
  source 1..61: mol_type = other RNA
aaaaaaaaaaaaaaaaaaaaaaaaaaaaaaaaaaaaaaaaaaaaaaaaaaaaaaaaataaa

SEQ ID NO: 10098 - RNA, 61 nt, synthetic construct
  source 1..61: mol_type = other RNA
aaaaaaaaaaaaaaaaaaaaaaaaaaaaaaaaaaaaaaaaaaaaaaaaaaaaaaaaaatat

SEQ ID NO: 10099 - RNA, 61 nt, synthetic construct
  source 1..61: mol_type = other RNA
aaaaaaaaaaaaaaaaaaaaaaaaaaaaaaaaaaaaaaaaaaaaaaaaaaaaaataaatat

SEQ ID NO: 10100 - RNA, 61 nt, synthetic construct
  source 1..61: mol_type = other RNA
aaaaaaaaaaaaaaaaaaaaaaaaaaaaaaaaaaaaaaaaaaaaaaaaaataaataaatat

SEQ ID NO: 10101 - RNA, 61 nt, synthetic construct
  source 1..61: mol_type = other RNA
aaaaaaaaaaaaaaaaaaaaaaaaaaaaaaaaaaaaaaaaaaaaaataaataaataaatat

SEQ ID NO: 10102 - RNA, 61 nt, synthetic construct
  source 1..61: mol_type = other RNA
aaaaaaaaaaaaaaaaaaaaaaaaaaaaaaaaaaaaaaaaaaaaaaaaaaaaaaaaaaata

SEQ ID NO: 10103 - RNA, 61 nt, synthetic construct
  source 1..61: mol_type = other RNA
aaaaaaaaaaaaaaaaaaaaaaaaaaaaaaaaaaaaaaaaaaaaaaaaaaaaaaataaata

SEQ ID NO: 10104 - RNA, 61 nt, synthetic construct
  source 1..61: mol_type = other RNA
aaaaaaaaaaaaaaaaaaaaaaaaaaaaaaaaatataaataaataaataaatataaatata

SEQ ID NO: 10105 - RNA, 61 nt, synthetic construct
  source 1..61: mol_type = other RNA
aaaaaaaaaaaaaaaaaaaaaaaaaaaaataaatataaataaataaataaatataaatata

SEQ ID NO: 10106 - RNA, 61 nt, synthetic construct
  source 1..61: mol_type = other RNA
aaataaataaataaatataaaaaaaaaaaaaaaaaaaaaaaaaaaaaaaaaaaaaaatata

SEQ ID NO: 10107 - RNA, 61 nt, synthetic construct
  source 1..61: mol_type = other RNA
aaataaataaataaatataaataaaaaaaaaaaaaaaaaaaaaaaaaaaaaaaaaaatata

SEQ ID NO: 10108 - RNA, 61 nt, synthetic construct
  source 1..61: mol_type = other RNA
aaataaataaatataaataaataaaaaaaaaaaaaaaaaaaaaaaaaaaaaaaaaaatata

SEQ ID NO: 10109 - RNA, 61 nt, synthetic construct
  source 1..61: mol_type = other RNA
aaaaaaaaaaaaaaaaaaaaaaaaaaaaaaaaaaaaaaaaaaaaaaaaaaaaaaaatataa

SEQ ID NO: 10110 - RNA, 61 nt, synthetic construct
  source 1..61: mol_type = other RNA
aaataaataaataaatataaataaaaaaaaaaaaaaaaaaaaaaaaaaaaaaataaatata

SEQ ID NO: 10111 - RNA, 61 nt, synthetic construct
  source 1..61: mol_type = other RNA
aaataaataaatataaataaataaaaaaaaaaaaaaaaaaaaaaaaaaaaaaataaatata

SEQ ID NO: 10112 - RNA, 61 nt, synthetic construct
  source 1..61: mol_type = other RNA
aaataaataaataaatataaataaataaaaaaaaaaaaaaaaaaaaaaaaaaaaaaatata

SEQ ID NO: 10113 - RNA, 61 nt, synthetic construct
  source 1..61: mol_type = other RNA
aaaaaaaaaaaaaaaaaaaaaaaaaaaaaaaaaaaaaaaaaaaaaaaaaaaataaatataa

SEQ ID NO: 10114 - RNA, 61 nt, synthetic construct
  source 1..61: mol_type = other RNA
aaataaataaataaatataaataaataaaaaaaaaaaaaaaaaaaaaaaaaaataaatata

SEQ ID NO: 10115 - RNA, 61 nt, synthetic construct
  source 1..61: mol_type = other RNA
aaataaataaatataaataaataaataaaaaaaaaaaaaaaaaaaaaaaaaaataaatata

SEQ ID NO: 10116 - RNA, 61 nt, synthetic construct
  source 1..61: mol_type = other RNA
aaaaaaaaaaaaaaaaaaaaaaaaaaaaaaaaaaaaaaaaatataaataaataaatatata

SEQ ID NO: 10117 - RNA, 61 nt, synthetic construct
  source 1..61: mol_type = other RNA
aaatataaataaataaataaataaataaataaaaaaaaaaaaaaaaaaaaaaaaaaatata

SEQ ID NO: 10118 - RNA, 61 nt, synthetic construct
  source 1..61: mol_type = other RNA
aaatataaataaataaataaataaataaataaataaaaaaaaaaaaaaaaaaaaaaatata

SEQ ID NO: 10119 - RNA, 61 nt, synthetic construct
  source 1..61: mol_type = other RNA
aaaaaaaaaaaaaaaaaaaaaaaaaaaaaaaaaaaaataaatataaataaataaatatata

SEQ ID NO: 10120 - RNA, 61 nt, synthetic construct
  source 1..61: mol_type = other RNA
aaatataaataaataaataaataaataaataaataaaaaaaaaaaaaaaaaaataaatata

SEQ ID NO: 10121 - RNA, 61 nt, synthetic construct
  source 1..61: mol_type = other RNA
aaaaaaaaaaaaaaaaaaaaaaaaaaaaaaaaaaaataaataaataaataaataaatataa

SEQ ID NO: 10122 - RNA, 61 nt, synthetic construct
  source 1..61: mol_type = other RNA
aaataaaaaaaaaaaaaaaaaaaaaaaaaaaaaaaaaaaaaaaaaaaaaaaaaaaaaataa

SEQ ID NO: 10123 - RNA, 61 nt, synthetic construct
  source 1..61: mol_type = other RNA
aaaaaaaaaaaaaaaaaaaaaaaaaaaaaaaataaataaataaataaataaataaatataa

SEQ ID NO: 10124 - RNA, 61 nt, synthetic construct
  source 1..61: mol_type = other RNA
aaaaaaaaaaaaaaaaaaaaaaaaaaaaaaaataaataaataaataaataaatataaataa

SEQ ID NO: 10125 - RNA, 61 nt, synthetic construct
  source 1..61: mol_type = other RNA
aaaaaaaaaaaaaaaaaaaaatataaataaataaataaataaataaataaataaatatata

SEQ ID NO: 10126 - RNA, 61 nt, synthetic construct
  source 1..61: mol_type = other RNA
aaataaataaaaaaaaaaaaaaaaaaaaaaaaaaaaaaaaaaaaaaaaaaaaaaaaaataa

SEQ ID NO: 10127 - RNA, 61 nt, synthetic construct
  source 1..61: mol_type = other RNA
aaataaaaaaaaaaaaaaaaaaaaaaaaaaaaaaaaaaaaaaaaaaaaaaaaaataaataa

SEQ ID NO: 10128 - RNA, 61 nt, synthetic construct
  source 1..61: mol_type = other RNA
aaaaaaaaaaaaaaaaaaaaaaaaaaaataaataaataaataaataaataaataaatataa

SEQ ID NO: 10129 - RNA, 61 nt, synthetic construct
  source 1..61: mol_type = other RNA
aaaaaaaaaaaaaaaaaaaaaaaaaaaataaataaataaataaataaataaatataaataa

SEQ ID NO: 10130 - RNA, 61 nt, synthetic construct
  source 1..61: mol_type = other RNA
aaaaaaaaaaaaaaaaataaatataaataaataaataaataaataaataaataaatatata

SEQ ID NO: 10131 - RNA, 61 nt, synthetic construct
  source 1..61: mol_type = other RNA
aaaaaaaaaaaaaaaaataaataaataaatataaataaataaataaataaataaatatata

SEQ ID NO: 10132 - RNA, 61 nt, synthetic construct
  source 1..61: mol_type = other RNA
aaaaaaaaaaaaaaaaataaataaatataaataaataaataaataaataaataaatatata

SEQ ID NO: 10133 - RNA, 61 nt, synthetic construct
  source 1..61: mol_type = other RNA
aaataaataaataaaaaaaaaaaaaaaaaaaaaaaaaaaaaaaaaaaaaaaaaaaaaataa

SEQ ID NO: 10134 - RNA, 61 nt, synthetic construct
  source 1..61: mol_type = other RNA
aaataaataaaaaaaaaaaaaaaaaaaaaaaaaaaaaaaaaaaaaaaaaaaaaataaataa

SEQ ID NO: 10135 - RNA, 61 nt, synthetic construct
  source 1..61: mol_type = other RNA
aaataaaaaaaaaaaaaaaaaaaaaaaaaaaaaaaaaaaaaaaaaaaaaataaataaataa

SEQ ID NO: 10136 - RNA, 61 nt, synthetic construct
  source 1..61: mol_type = other RNA
aaaaaaaaaaaaaaaaaaaaaaaataaataaataaataaataaataaataaataaatataa

SEQ ID NO: 10137 - RNA, 61 nt, synthetic construct
  source 1..61: mol_type = other RNA
aaaaaaaaaaaaaaaaaaaaaaaataaataaataaataaataaataaataaatataaataa

SEQ ID NO: 10138 - RNA, 61 nt, synthetic construct
  source 1..61: mol_type = other RNA
aaataaaaaaaaaaaaaaaaaaaaaaaaaaaaaaaaaaaaaaaaaaaaaaaaaaaaataaa

SEQ ID NO: 10139 - RNA, 61 nt, synthetic construct
  source 1..61: mol_type = other RNA
aaataaataaataaaaaaaaaaaaaaaaaaaaaaaaaaaaaaaaaaaaaaaaaataaataa

SEQ ID NO: 10140 - RNA, 61 nt, synthetic construct
  source 1..61: mol_type = other RNA
aaataaataaaaaaaaaaaaaaaaaaaaaaaaaaaaaaaaaaaaaaaaaaaaaaaaataaa

SEQ ID NO: 10141 - RNA, 61 nt, synthetic construct
  source 1..61: mol_type = other RNA
aaataaataaataaaaaaaaaaaaaaaaaaaaaaaaaaaaaaaaaaaaaaaaaaaaataaa

SEQ ID NO: 10142 - RNA, 61 nt, synthetic construct
  source 1..61: mol_type = other RNA
aaaaaaaaaaaaaaaaaaaaaaaaaaaaaaaaaaaaaaaaaaaaaaaaaaaaaaaaataat

SEQ ID NO: 10143 - RNA, 61 nt, synthetic construct
  source 1..61: mol_type = other RNA
aaaaaaaaaaaaaaaaaaaaaaaaaaaaaaaaaaaaaaaaaaaaaaaaaaaaataaataat

SEQ ID NO: 10144 - RNA, 61 nt, synthetic construct
  source 1..61: mol_type = other RNA
aaataaaaaaaaaaaaaaaaaaaaaaaaaaaaaaaaaaaaaaaaaaaaaaaaaataaatat

SEQ ID NO: 10145 - RNA, 61 nt, synthetic construct
  source 1..61: mol_type = other RNA
aaaaaaaaaaaaaaaaaaaaaaaaaaaaaaaaaaaaaataaaaaaaaaaaaaaaaaatata

SEQ ID NO: 10146 - RNA, 61 nt, synthetic construct
  source 1..61: mol_type = other RNA
aaaaaataaaaaaaaaaaaaaaaaaaaaaaaaaaaaaaaaaaaaaaaaaaaaaaaaatata

SEQ ID NO: 10147 - RNA, 61 nt, synthetic construct
  source 1..61: mol_type = other RNA
aaaaaaaaaaaaaaaaaaaaaaaaaaaaaaaaataaaaaaaaaaaaaaaaaaaaaaatata

SEQ ID NO: 10148 - RNA, 61 nt, synthetic construct
  source 1..61: mol_type = other RNA
aaaaaaaaaaaaaaaaaaataaaaaaaaaaaaaaaaaaaaaaaaaaaaaaaaaaaaatata

SEQ ID NO: 10149 - RNA, 61 nt, synthetic construct
  source 1..61: mol_type = other RNA
aaaaaaaaaaaaaaaaaaaaaaaaaaaaaaaataaaaaaaaaaaaaaaaaaaaaaaatata

SEQ ID NO: 10150 - RNA, 61 nt, synthetic construct
  source 1..61: mol_type = other RNA
aaaaaaaaaaaaaaaaaaaaaaaaaaaaaaaaaaaaaaaaaaaaataaaaaaaaaaatata

SEQ ID NO: 10151 - RNA, 61 nt, synthetic construct
  source 1..61: mol_type = other RNA
aaaaaaaaaaaaaaaaataaaaaaaaaaaaaaaaaaaaaaaaaaaaaaaaaaaaaaatata

SEQ ID NO: 10152 - RNA, 61 nt, synthetic construct
  source 1..61: mol_type = other RNA
aaaaaaaaaaaaaaaaaaaaaaaaaaaaaaaaaaaaaaaaaaaaaaaaaaaaaaaatatat

SEQ ID NO: 10153 - RNA, 61 nt, synthetic construct
  source 1..61: mol_type = other RNA
aaaaaataaaaaaaaaaaaaaaaaaaaaaaaaaaaaaaaaaaaaaaaaaaaaataaatata

SEQ ID NO: 10154 - RNA, 61 nt, synthetic construct
  source 1..61: mol_type = other RNA
aaaaaaaaaaaaaaaaaaaaaaaaaaaaaaaaataaataaaaaaaaaaaaaaaaaaatata

SEQ ID NO: 10155 - RNA, 61 nt, synthetic construct
  source 1..61: mol_type = other RNA
aaaaaaaataaataaaaaaaaaaaaaaaaaaaaaaaaaaaaaaaaaaaaaaaataaatata

SEQ ID NO: 10156 - RNA, 61 nt, synthetic construct
  source 1..61: mol_type = other RNA
aaaaaaaaaaaaaaaaaaaaaaaataaataaataaataaaaaaaaaaaaaaaaaaaatata

SEQ ID NO: 10157 - RNA, 61 nt, synthetic construct
  source 1..61: mol_type = other RNA
aaaaaaaataaataaaaaaaaaaaaaaaaaaaaaaaaaaaaaaaaaaaataaataaatata

SEQ ID NO: 10158 - RNA, 61 nt, synthetic construct
  source 1..61: mol_type = other RNA
aaaaaaaaaaaaaaaaaaaataaataaataaataaataaaaaaaaaaaaaaaaaaaatata

SEQ ID NO: 10159 - RNA, 61 nt, synthetic construct
  source 1..61: mol_type = other RNA
aaaaaaaaaaaaaaaataaataaataaataaataaataaaaaaaaaaaaaaaaaaaatata

SEQ ID NO: 10160 - RNA, 61 nt, synthetic construct
  source 1..61: mol_type = other RNA
aaaaaaaaaaaaaaaaaaaataaataaataaataaataaataaaaaaaaaaaaaaaatata

SEQ ID NO: 10161 - RNA, 61 nt, synthetic construct
  source 1..61: mol_type = other RNA
aaaaaaaaaaaataaataaataaataaataaataaataaaaaaaaaaaaaaaaaaaatata

SEQ ID NO: 10162 - RNA, 61 nt, synthetic construct
  source 1..61: mol_type = other RNA
aaaaaaaataaataaataaataaataaataaataaataaaaaaaaaaaaaaaaaaaatata

SEQ ID NO: 10163 - RNA, 61 nt, synthetic construct
  source 1..61: mol_type = other RNA
aaaaataaataaataaataaataaataaataaataaaaaaaaaaaaaaaaaaaaaaatata

SEQ ID NO: 10164 - RNA, 61 nt, synthetic construct
  source 1..61: mol_type = other RNA
aaaataaataaataaataaataaataaataaataaataaaaaaaaaaaaaaaaaaaatata

SEQ ID NO: 10165 - RNA, 61 nt, synthetic construct
  source 1..61: mol_type = other RNA
aaaaataaataaataaataaataaataaataaataaaaaaaaaaaaaaaaaaataaatata

SEQ ID NO: 10166 - RNA, 61 nt, synthetic construct
  source 1..61: mol_type = other RNA
aaataaataaaaaaaaaaaaaaaaaaaaaaaaaaaaaaaaaaaaaaaaaaaaaaaaaaata

SEQ ID NO: 10167 - RNA, 61 nt, synthetic construct
  source 1..61: mol_type = other RNA
aaataaataaataaatataaatataaaaaaaaaaaaaaaaaaaaaaaaaaaaaaaaatata

SEQ ID NO: 10168 - RNA, 61 nt, synthetic construct
  source 1..61: mol_type = other RNA
aaataaataaatataaataaatataaaaaaaaaaaaaaaaaaaaaaaaaaaaaaaaatata

SEQ ID NO: 10169 - RNA, 61 nt, synthetic construct
  source 1..61: mol_type = other RNA
aaaaaaaaaaaaaaaaaaaaatataaataaataaataaataaataaataaataaataaata

SEQ ID NO: 10170 - RNA, 61 nt, synthetic construct
  source 1..61: mol_type = other RNA
aaataaataaataaatataaataaaaaaaaaaaaaaaaaaaaaaaaaaaaatataaatata

SEQ ID NO: 10171 - RNA, 61 nt, synthetic construct
  source 1..61: mol_type = other RNA
aaataaataaatataaataaataaaaaaaaaaaaaaaaaaaaaaaaaaaaatataaatata

SEQ ID NO: 10172 - RNA, 61 nt, synthetic construct
  source 1..61: mol_type = other RNA
aaaaaaaaaaaaaaaaataaatataaataaataaataaataaataaataaataaataaata

SEQ ID NO: 10173 - RNA, 61 nt, synthetic construct
  source 1..61: mol_type = other RNA
aaaaaaaaaaaaaaaaataaataaatataaataaataaataaataaataaataaataaata

SEQ ID NO: 10174 - RNA, 61 nt, synthetic construct
  source 1..61: mol_type = other RNA
aaaaaaaaaaaaaaaaataaataaataaatataaataaataaataaataaataaataaata

SEQ ID NO: 10175 - RNA, 61 nt, synthetic construct
  source 1..61: mol_type = other RNA
aaataaataaataaatataaataaataaaaaaaaaaaaaaaaaaaaaaaaatataaatata

SEQ ID NO: 10176 - RNA, 61 nt, synthetic construct
  source 1..61: mol_type = other RNA
aaataaataaatataaataaataaataaaaaaaaaaaaaaaaaaaaaaaaatataaatata

SEQ ID NO: 10177 - RNA, 61 nt, synthetic construct
  source 1..61: mol_type = other RNA
aaataaataaataaatataaataaataaataaatataaaaaaaaaaaaaaaaataaatata

SEQ ID NO: 10178 - RNA, 61 nt, synthetic construct
  source 1..61: mol_type = other RNA
aaataaataaatataaataaataaataaataaatataaaaaaaaaaaaaaaaataaatata

SEQ ID NO: 10179 - RNA, 61 nt, synthetic construct
  source 1..61: mol_type = other RNA
aaataaataaataaataaataaatataaataaatataaaaaaaaaaaaaaaaataaatata

SEQ ID NO: 10180 - RNA, 61 nt, synthetic construct
  source 1..61: mol_type = other RNA
aaatataaataaataaataaataaataaataaataaaaaaaaaaaaaaaaatataaatata

SEQ ID NO: 10181 - RNA, 61 nt, synthetic construct
  source 1..61: mol_type = other RNA
aaataaataaataaatataaataaataaataaatataaataaaaaaaaaaaaataaatata

SEQ ID NO: 10182 - RNA, 61 nt, synthetic construct
  source 1..61: mol_type = other RNA
aaataaataaataaatataaataaataaataaatataaaaaaaaaaaaataaataaatata

SEQ ID NO: 10183 - RNA, 61 nt, synthetic construct
  source 1..61: mol_type = other RNA
aaataaataaataaataaataaatataaataaatataaataaaaaaaaaaaaataaatata

SEQ ID NO: 10184 - RNA, 61 nt, synthetic construct
  source 1..61: mol_type = other RNA
aaataaataaataaataaataaatataaataaatataaaaaaaaaaaaataaataaatata

SEQ ID NO: 10185 - RNA, 61 nt, synthetic construct
  source 1..61: mol_type = other RNA
aaataaataaatataaataaataaataaataaatataaataaaaaaaaaaaaataaatata

SEQ ID NO: 10186 - RNA, 61 nt, synthetic construct
  source 1..61: mol_type = other RNA
aaataaataaatataaataaataaataaataaatataaaaaaaaaaaaataaataaatata

SEQ ID NO: 10187 - RNA, 61 nt, synthetic construct
  source 1..61: mol_type = other RNA
aaatataaataaataaataaataaataaataaataaaaaaaaaaaaataaatataaatata

SEQ ID NO: 10188 - RNA, 61 nt, synthetic construct
  source 1..61: mol_type = other RNA
aaaaaaaaaaaaaaaaaaaaaaaaaaaaaaaaaatataaataaataaataaataaatataa

SEQ ID NO: 10189 - RNA, 61 nt, synthetic construct
  source 1..61: mol_type = other RNA
aaataaataaataaataaataaatataaataaatataaataaaaaaaaataaataaatata

SEQ ID NO: 10190 - RNA, 61 nt, synthetic construct
  source 1..61: mol_type = other RNA
aaataaataaataaatataaataaataaataaatataaataaaaaaaaataaataaatata

SEQ ID NO: 10191 - RNA, 61 nt, synthetic construct
  source 1..61: mol_type = other RNA
aaataaataaataaataaatataaataaataaatataaataaaaaaaaataaataaatata

SEQ ID NO: 10192 - RNA, 61 nt, synthetic construct
  source 1..61: mol_type = other RNA
aaataaataaatataaataaataaataaataaatataaataaaaaaaaataaataaatata

SEQ ID NO: 10193 - RNA, 62 nt, synthetic construct
  source 1..62: mol_type = other RNA
aaaaaaaaaaaaaaaaaaaaaaaaaaaaaaaaaaaaaaaaaaaaaaaaaaaaaaaaaatata

SEQ ID NO: 10194 - RNA, 62 nt, synthetic construct
  source 1..62: mol_type = other RNA
aaaaaaaaaaaaaaaaaaaaaaaaaaaaaaaaaaaaaaaaaaaaaaaaaaaaaataaatata

SEQ ID NO: 10195 - RNA, 62 nt, synthetic construct
  source 1..62: mol_type = other RNA
aaaaaaaaaaaaaaaaaaaaaaaaaaaaaaaaaaaaaaaaaaaaaataaataaataaatata

SEQ ID NO: 10196 - RNA, 62 nt, synthetic construct
  source 1..62: mol_type = other RNA
aaaaaaaaaaaaaaaaaaaaaaaaaaaaaaaaaaaaaaaaaataaataaataaataaatata

SEQ ID NO: 10197 - RNA, 62 nt, synthetic construct
  source 1..62: mol_type = other RNA
aaaaaaaaaaaaaaaaaaaaaaaaaaaaaaaaaaaaaataaataaataaataaataaatata

SEQ ID NO: 10198 - RNA, 62 nt, synthetic construct
  source 1..62: mol_type = other RNA
aaaaaaaaaaaaaaaaaaaaaaaaaaaaaaaaaataaataaataaataaataaataaatata

SEQ ID NO: 10199 - RNA, 62 nt, synthetic construct
  source 1..62: mol_type = other RNA
aaaaaaaaaaaaaaaaaaaaaaaaaaaaaaaaaaaaaaaaaaaaaaaaaaaaaaaaaaataa

SEQ ID NO: 10200 - RNA, 62 nt, synthetic construct
  source 1..62: mol_type = other RNA
aaaaaaaaaaaaaaaaaaaaaaaaaaaaaaaaaaaaaaaaaaaaaaaaaaaaaaataaataa

SEQ ID NO: 10201 - RNA, 62 nt, synthetic construct
  source 1..62: mol_type = other RNA
aaaaaaaaaaaaaaaaaaaaaaaaaaaaaaaaaaaaaaaaaaaaaaaaaaataaataaataa

SEQ ID NO: 10202 - RNA, 62 nt, synthetic construct
  source 1..62: mol_type = other RNA
aaaaaaaaaaaaaaaaaaaaaaaaaaaaaaaaaaaaaaaaaaaaaaaaaaaaaaaaaataaa

SEQ ID NO: 10203 - RNA, 62 nt, synthetic construct
  source 1..62: mol_type = other RNA
aaaaaaaaaaaaaaaaaaaaaaaaaaaaaaaaaaaaaaaaaaaaaaaaaaaaaaaaaaatat

SEQ ID NO: 10204 - RNA, 62 nt, synthetic construct
  source 1..62: mol_type = other RNA
aaaaaaaaaaaaaaaaaaaaaaaaaaaaaaaaaaaaaaaaaaaaaaaaaaaaaaataaatat

SEQ ID NO: 10205 - RNA, 62 nt, synthetic construct
  source 1..62: mol_type = other RNA
aaaaaaaaaaaaaaaaaaaaaaaaaaaaaaaaaaaaaaaaaaaaaaaaaaataaataaatat

SEQ ID NO: 10206 - RNA, 62 nt, synthetic construct
  source 1..62: mol_type = other RNA
aaaaaaaaaaaaaaaaaaaaaaaaaaaaaaaaaaaaaaaaaaaaaaaaaaaaaaaaaaaata

SEQ ID NO: 10207 - RNA, 62 nt, synthetic construct
  source 1..62: mol_type = other RNA
aaaaaaaaaaaaaaaaaaaaaaaaaaaaaaaaaaaaaaaaaaaaaaaaaaaaaaaaatataa

SEQ ID NO: 10208 - RNA, 62 nt, synthetic construct
  source 1..62: mol_type = other RNA
aaaaaaaaaaaaaaaaaaaaaaaaaaaaaaaaaaaaaaaaaaaaaaaaaaaaaaaaaataat

SEQ ID NO: 10209 - RNA, 62 nt, synthetic construct
  source 1..62: mol_type = other RNA
aaaaaaaaaaaaaaaaataaaaaaaaaaaaaaaaaaaaaaaaaaaaaaaaaaaaaaaatata

SEQ ID NO: 10210 - RNA, 62 nt, synthetic construct
  source 1..62: mol_type = other RNA
aaaaaaaaaaaaaaaaaaaataaaaaaaaaaaaaaaaaaaaaaaaaaaaaaaaaaaaatata

SEQ ID NO: 10211 - RNA, 62 nt, synthetic construct
  source 1..62: mol_type = other RNA
aaaaaaaaaaaaaaaaaaaaaaaaaaaaaaaataaaaaaaaaaaaaaaaaaaaaaaaatata

SEQ ID NO: 10212 - RNA, 62 nt, synthetic construct
  source 1..62: mol_type = other RNA
aaaaaaaaaaaaaaaaaaataaaaaaaaaaaaaaaaaaaaaaaaaaaaaaaaaaaaaatata

SEQ ID NO: 10213 - RNA, 62 nt, synthetic construct
  source 1..62: mol_type = other RNA
aaaaaaaaaaaaaaaaaaaaaaaaaaaaaaaaaaaaaaaaaaaaaaaaaaataaaaaatata

SEQ ID NO: 10214 - RNA, 62 nt, synthetic construct
  source 1..62: mol_type = other RNA
aaaaaaaaaaaaaaaaaaaaaaataaaaaaaaaaaaaaaaaaaaaaaaaaaaaaaaaatata

SEQ ID NO: 10215 - RNA, 62 nt, synthetic construct
  source 1..62: mol_type = other RNA
aaaaaaaaaaaaaaaaaaaaaaaataaaaaaaaaaaaaaaaaaaaaaaaaaaaaaaaatata

SEQ ID NO: 10216 - RNA, 62 nt, synthetic construct
  source 1..62: mol_type = other RNA
aaaaaaaaaaaaaaaaaaaaaaaaaaaaaaaaaaaaaataaaaaaaaaaaaaaaaaaatata

SEQ ID NO: 10217 - RNA, 62 nt, synthetic construct
  source 1..62: mol_type = other RNA
aaaaaaaaaaaaaaaaaaaaaaaaaaaaaaaaaaaaaaaaaaataaaaaaaaaaaaaatata

SEQ ID NO: 10218 - RNA, 62 nt, synthetic construct
  source 1..62: mol_type = other RNA
aaaaaaaaaaaaaaaaaaaaaaaaaaaaaaaaaaaataaaaaaaaaaaaaaaaaaaaatata

SEQ ID NO: 10219 - RNA, 62 nt, synthetic construct
  source 1..62: mol_type = other RNA
aaaaaaaaaaaaaaaaaaaaaaaaaaaaaaaaaaaaaaaaaaaaaaaaaaaataaaaatata

SEQ ID NO: 10220 - RNA, 62 nt, synthetic construct
  source 1..62: mol_type = other RNA
aaaaaaaaaaaaaaaaaaaaaaaaaaaaaaaaaaaaaaaaaaaaataaaaaaaaaaaatata

SEQ ID NO: 10221 - RNA, 62 nt, synthetic construct
  source 1..62: mol_type = other RNA
aaaaaaaaaaaaaaaaaaaaaaaaaaaaaaaaaaaaaaaaataaaaaaaaaaaaaaaatata

SEQ ID NO: 10222 - RNA, 62 nt, synthetic construct
  source 1..62: mol_type = other RNA
aaaaaaaaaaaaaaaaaaaaaaaaaaaaaaaaaaaaaaaaaaaaaaaaaaaaaaaaatatat

SEQ ID NO: 10223 - RNA, 62 nt, synthetic construct
  source 1..62: mol_type = other RNA
aaaaaaaaaaaaaaaaaaaaaaaaaaaaaaaaaaaaaaaaaaaaaataaataaaaaaatata

SEQ ID NO: 10224 - RNA, 62 nt, synthetic construct
  source 1..62: mol_type = other RNA
aaaaaaaaaaaaaaaaaaaaaaaaaaaaaaaaaaaaaaaaaaaaaataaaaaaataaatata

SEQ ID NO: 10225 - RNA, 62 nt, synthetic construct
  source 1..62: mol_type = other RNA
aaaaaaaaaaaaaaaaataaaaaaaaaaaaaaaaaaaaaaaaaaaaaaaaaaaataaatata

SEQ ID NO: 10226 - RNA, 62 nt, synthetic construct
  source 1..62: mol_type = other RNA
aaaaaaaaaaaaaaaaaaataaataaaaaaaaaaaaaaaaaaaaaaaaaaaaaaaaaatata

SEQ ID NO: 10227 - RNA, 62 nt, synthetic construct
  source 1..62: mol_type = other RNA
aaaaaaaaaaaaaaaaaaaaaaaaaaaaaaaaaaaaaaaaaaaaataaaaaaaataaatata

SEQ ID NO: 10228 - RNA, 62 nt, synthetic construct
  source 1..62: mol_type = other RNA
aaaaaaaaaaaaaaaaaaaaaaaaaaaaaaaaaaaaataaataaaaaaaaaaaaaaaatata

SEQ ID NO: 10229 - RNA, 62 nt, synthetic construct
  source 1..62: mol_type = other RNA
aaaaaaaaaaaaaaaaaaaaaaaaaaaaaaaaaaaaaaaaaaaaaaaaaaaaaaaaaaaaaa

SEQ ID NO: 10230 - RNA, 62 nt, synthetic construct
  source 1..62: mol_type = other RNA
aaaaaaaaaaaaaaaaaaataaataaataaaaaaaaaaaaaaaaaaaaaaaaaaaaaatata

SEQ ID NO: 10231 - RNA, 62 nt, synthetic construct
  source 1..62: mol_type = other RNA
aaaaaaaaaaaaaaaaaaaaaaaaaaaaaaaaataaataaataaaaaaaaaaaaaaaatata

SEQ ID NO: 10232 - RNA, 62 nt, synthetic construct
  source 1..62: mol_type = other RNA
aaaaaaaaaaaaaaaaaaaaaaaaaaaataaaaaaaaaaaaaaaaataaataaataaatata

SEQ ID NO: 10233 - RNA, 62 nt, synthetic construct
  source 1..62: mol_type = other RNA
aaaaaaaaaaaaaaaaaaaaaaaaataaaaaaaaaaaaaaaaaaaataaataaataaatata

SEQ ID NO: 10234 - RNA, 62 nt, synthetic construct
  source 1..62: mol_type = other RNA
aaaaaaaaaaaaaaaaaaaaaaaaaaaaataaaaaaaaaaaaaaaataaataaataaatata

SEQ ID NO: 10235 - RNA, 62 nt, synthetic construct
  source 1..62: mol_type = other RNA
aaaaaaaaaaaataaaaaaaaaaaaaaaaaaaaaaaaaaaaaaaaataaataaataaatata

SEQ ID NO: 10236 - RNA, 62 nt, synthetic construct
  source 1..62: mol_type = other RNA
aaaaaaaaaaaaaaaaaaaaaaaaaaaaaaaaaaaaaataaaaaaataaataaataaatata

SEQ ID NO: 10237 - RNA, 62 nt, synthetic construct
  source 1..62: mol_type = other RNA
aaaaaaaaaaaaaaaaaaaaaaaaaaaaaaaaaataaaaaaaaaaataaataaataaatata

SEQ ID NO: 10238 - RNA, 62 nt, synthetic construct
  source 1..62: mol_type = other RNA
aaaaaaaaaaaaaaaaaaaaaaataaaaaaaaaaaaaaaaaaaaaataaataaataaatata

SEQ ID NO: 10239 - RNA, 62 nt, synthetic construct
  source 1..62: mol_type = other RNA
aaaaaaaaaaaaaaaaaaaaaaaaaaaaaataaaaaaaaaaaaaaataaataaataaatata

SEQ ID NO: 10240 - RNA, 62 nt, synthetic construct
  source 1..62: mol_type = other RNA
aaaaaataaaaaaaaaaaaaaaaaaaaaaaaaaaaaaaaaaaaaaataaataaataaatata

SEQ ID NO: 10241 - RNA, 62 nt, synthetic construct
  source 1..62: mol_type = other RNA
aaaaaaaaaaaaaaaaaaaaaaaaaaaaaaaaaaaaaaaaataaaataaataaataaatata

SEQ ID NO: 10242 - RNA, 62 nt, synthetic construct
  source 1..62: mol_type = other RNA
aaaaaaaaaaaaaaaaaaaaaaaaaaaaaaaaaaaaataaaaaaaataaataaataaatata

SEQ ID NO: 10243 - RNA, 62 nt, synthetic construct
  source 1..62: mol_type = other RNA
aaaaaaaaaaaaaaaaaaaaaaaaaaaaaaaaaaaaaaataaaaaataaataaataaatata

SEQ ID NO: 10244 - RNA, 62 nt, synthetic construct
  source 1..62: mol_type = other RNA
aaaaaaaaaaaaataaaaaaaaaaaaaaaaaaaaaaaaaaaaaaaataaataaataaatata

SEQ ID NO: 10245 - RNA, 62 nt, synthetic construct
  source 1..62: mol_type = other RNA
aaaaaaaaaaaaaaataaataaataaataaaaaaaaaaaaaaaaaaaaaaaaaaaaaatata

SEQ ID NO: 10246 - RNA, 62 nt, synthetic construct
  source 1..62: mol_type = other RNA
aaaaaaaaaaaaaaaaaaaaaaaaaaaaataaataaataaataaaaaaaaaaaaaaaatata

SEQ ID NO: 10247 - RNA, 62 nt, synthetic construct
  source 1..62: mol_type = other RNA
aaaaaaaaaaaaaaaaaaaaaaaaaaaaaaaaataaataaataaaaaaaaaaaataaatata

SEQ ID NO: 10248 - RNA, 62 nt, synthetic construct
  source 1..62: mol_type = other RNA
aaaaaaaaaaaaaaaaaaaaaaaaataaataaaaaaaaaaaaaaaataaataaataaatata

SEQ ID NO: 10249 - RNA, 62 nt, synthetic construct
  source 1..62: mol_type = other RNA
aaaaaaaaaaaaaaaaaaaaaaaaaaaaataaaaaaaaaaaataaataaataaataaatata

SEQ ID NO: 10250 - RNA, 62 nt, synthetic construct
  source 1..62: mol_type = other RNA
aaaaaaaaaaaaaaaaaaaaaaaaaaaataaaaaaaaaaaaataaataaataaataaatata

SEQ ID NO: 10251 - RNA, 62 nt, synthetic construct
  source 1..62: mol_type = other RNA
aaaaaaaaaaaaaaaaaaaaaaaaataaaaaaaaaaaaaaaataaataaataaataaatata

SEQ ID NO: 10252 - RNA, 62 nt, synthetic construct
  source 1..62: mol_type = other RNA
aaaaaaaaaaaaaaaaaaaaaaaaaaaaaaaaataaaaaaaataaataaataaataaatata

SEQ ID NO: 10253 - RNA, 62 nt, synthetic construct
  source 1..62: mol_type = other RNA
aaaaaaaaaaaaaaaaaaaaaaaaaaaaaaaaaataaataaaaaaataaataaataaatata

SEQ ID NO: 10254 - RNA, 62 nt, synthetic construct
  source 1..62: mol_type = other RNA
aaaaaaaaaaaaaaaaaaaaaaaaaaaaaaaaaataaaaaaataaataaataaataaatata

SEQ ID NO: 10255 - RNA, 62 nt, synthetic construct
  source 1..62: mol_type = other RNA
aaaaaaaaaaaaaaaaaaaaaaaaaaaaataaataaataaataaaaaaaaaaaataaatata

SEQ ID NO: 10256 - RNA, 62 nt, synthetic construct
  source 1..62: mol_type = other RNA
aaaaaaaaaaaaaaaaaaaaaaaaaaaaaaaaataaataaataaaaaaaataaataaatata

SEQ ID NO: 10257 - RNA, 62 nt, synthetic construct
  source 1..62: mol_type = other RNA
aaaaaaaaaaaaaaaaaaaaaaaaaaaataaaaaaaaataaataaataaataaataaatata

SEQ ID NO: 10258 - RNA, 62 nt, synthetic construct
  source 1..62: mol_type = other RNA
aaaaaaaaaaaaaaaaaaaaaaaaaaaaataaaaaaaataaataaataaataaataaatata

SEQ ID NO: 10259 - RNA, 62 nt, synthetic construct
  source 1..62: mol_type = other RNA
aaaaaaaaaaaaaaaaaaaaaaaaataaataaaaaaaaaaaataaataaataaataaatata

SEQ ID NO: 10260 - RNA, 62 nt, synthetic construct
  source 1..62: mol_type = other RNA
aaaaaaaaaaaaaaaaaaaaaaaaaaaaaaaaataaaataaataaataaataaataaatata

SEQ ID NO: 10261 - RNA, 62 nt, synthetic construct
  source 1..62: mol_type = other RNA
aaaaaaaaaaaaaaaaaaaaaaaaataaataaataaaaaaaaaaaataaataaataaatata

SEQ ID NO: 10262 - RNA, 62 nt, synthetic construct
  source 1..62: mol_type = other RNA
aaaaaaaaaaaaaaaaaaaaaaaaataaaaaaaaaaaataaataaataaataaataaatata

SEQ ID NO: 10263 - RNA, 62 nt, synthetic construct
  source 1..62: mol_type = other RNA
aaaaaaaaaaaaaaaaaataaaaaaaaaaaaaaaaaaataaataaataaataaataaatata

SEQ ID NO: 10264 - RNA, 62 nt, synthetic construct
  source 1..62: mol_type = other RNA
aaaaaaaaaaaaaaaaaaaaaaaataaataaaaaaaaaaaaataaataaataaataaatata

SEQ ID NO: 10265 - RNA, 62 nt, synthetic construct
  source 1..62: mol_type = other RNA
aaaaaaaaaaaataaaaaaaaaaaaaaaaaaaaaaaaataaataaataaataaataaatata

SEQ ID NO: 10266 - RNA, 62 nt, synthetic construct
  source 1..62: mol_type = other RNA
aaaaaaaaaaaaaaaaaaaaaaaaaataaaaaaaaaaataaataaataaataaataaatata

SEQ ID NO: 10267 - RNA, 62 nt, synthetic construct
  source 1..62: mol_type = other RNA
aaaaaaaaaaaaaaaaaaaaataaataaataaaaaaaaaaaaaaaataaataaataaatata

SEQ ID NO: 10268 - RNA, 62 nt, synthetic construct
  source 1..62: mol_type = other RNA
aaaaaaaaaaaaaaaaaaaaaaaaaaaaataaataaataaataaaaaaaataaataaatata

SEQ ID NO: 10269 - RNA, 62 nt, synthetic construct
  source 1..62: mol_type = other RNA
aaaaaaaaaaaaaaaaaaaaaaaaataaataaaaaaaataaataaataaataaataaatata

SEQ ID NO: 10270 - RNA, 62 nt, synthetic construct
  source 1..62: mol_type = other RNA
aaaaaaaaaaaaaaaaaaaaaaaaaaaataaaaataaataaataaataaataaataaatata

SEQ ID NO: 10271 - RNA, 62 nt, synthetic construct
  source 1..62: mol_type = other RNA
aaaaaaaaaaaaaaaaaaaaaaaataaataaaaaaaaataaataaataaataaataaatata

SEQ ID NO: 10272 - RNA, 62 nt, synthetic construct
  source 1..62: mol_type = other RNA
aaaaaaaaaaaaaaaaaaaaaaaaaaaaataaaataaataaataaataaataaataaatata

SEQ ID NO: 10273 - RNA, 62 nt, synthetic construct
  source 1..62: mol_type = other RNA
aaaaaaaaaaaaaaaaaaaaaaaaataaaaaaaataaataaataaataaataaataaatata

SEQ ID NO: 10274 - RNA, 62 nt, synthetic construct
  source 1..62: mol_type = other RNA
aaaaaaaaaaaaaaaaaaaaaaaaaaaaataaataaaataaataaataaataaataaatata

SEQ ID NO: 10275 - RNA, 62 nt, synthetic construct
  source 1..62: mol_type = other RNA
aaaaaaaaaaaaaaaaataaataaataaataaaaaaaaaaaaaaaataaataaataaatata

SEQ ID NO: 10276 - RNA, 62 nt, synthetic construct
  source 1..62: mol_type = other RNA
aaaaaaaaaaaaaaaaaataaaaaaaaaaaaaaataaataaataaataaataaataaatata

SEQ ID NO: 10277 - RNA, 62 nt, synthetic construct
  source 1..62: mol_type = other RNA
aaaaaaaaaaaaaaaaaaaaataaataaataaataaaaaaaaaaaataaataaataaatata

SEQ ID NO: 10278 - RNA, 62 nt, synthetic construct
  source 1..62: mol_type = other RNA
aaaaaaaaaaaaaaaaaaaaaaaaataaataaataaaaaaaataaataaataaataaatata

SEQ ID NO: 10279 - RNA, 62 nt, synthetic construct
  source 1..62: mol_type = other RNA
aaaaaaaaaaaaaaaaaaaaataaataaaaaaaaaaaataaataaataaataaataaatata

SEQ ID NO: 10280 - RNA, 62 nt, synthetic construct
  source 1..62: mol_type = other RNA
aaaaaaaaaaaaaaaaaaaaaaaataaataaaaataaataaataaataaataaataaatata

SEQ ID NO: 10281 - RNA, 62 nt, synthetic construct
  source 1..62: mol_type = other RNA
aaaaaaaaaaaaaaaaaaaaaaaaataaataaaataaataaataaataaataaataaatata

SEQ ID NO: 10282 - RNA, 62 nt, synthetic construct
  source 1..62: mol_type = other RNA
aaaaaaaaaaaaaaaaaaaaaaaaataaataaataaaataaataaataaataaataaatata

SEQ ID NO: 10283 - RNA, 62 nt, synthetic construct
  source 1..62: mol_type = other RNA
aaaaaaaaaaaaaaaaataaataaataaataaaaaaaaaaaataaataaataaataaatata

SEQ ID NO: 10284 - RNA, 62 nt, synthetic construct
  source 1..62: mol_type = other RNA
aaaaaaaaaaaaaaaaaaaataaataaataaaaaaaaataaataaataaataaataaatata

SEQ ID NO: 10285 - RNA, 62 nt, synthetic construct
  source 1..62: mol_type = other RNA
aaaaaaaaaaaaaaaaaaaaataaataaataaaaaaaataaataaataaataaataaatata

SEQ ID NO: 10286 - RNA, 62 nt, synthetic construct
  source 1..62: mol_type = other RNA
aaaaaaaaaaaaaaaaataaataaataaaaaaaaaaaataaataaataaataaataaatata

SEQ ID NO: 10287 - RNA, 62 nt, synthetic construct
  source 1..62: mol_type = other RNA
aaaaaaaaaaaaaaaaataaataaataaataaaaaaaataaataaataaataaataaatata

SEQ ID NO: 10288 - RNA, 62 nt, synthetic construct
  source 1..62: mol_type = other RNA
aaaaaaaaaaaaaaaaataaataaataaataaataaaataaataaataaataaataaatata

SEQ ID NO: 10289 - RNA, 62 nt, synthetic construct
  source 1..62: mol_type = other RNA
aaataaatataaataaataaataaaaaaaaaaaaaataaatataaataaataaataaatata

SEQ ID NO: 10290 - RNA, 62 nt, synthetic construct
  source 1..62: mol_type = other RNA
aaataaatataaataaataaataaataaaaaaaaaataaatataaataaataaataaatata

SEQ ID NO: 10291 - RNA, 62 nt, synthetic construct
  source 1..62: mol_type = other RNA
aaaaaaaaaaaaaaaaaaaaaaaaaaaaaaaaaaaaaaaaaaataataaataaataaatata

SEQ ID NO: 10292 - RNA, 62 nt, synthetic construct
  source 1..62: mol_type = other RNA
aaaaaaaaaaataaataaataaataaataaataaataaatataaataaatataaataaataa

SEQ ID NO: 10293 - RNA, 63 nt, synthetic construct
  source 1..63: mol_type = other RNA
aaaaaaaaaaaaaaaaaaaaaaaaaaaaaaaaaaaaaaaaaaaaaaaaaaaaaaaaaaatata

SEQ ID NO: 10294 - RNA, 63 nt, synthetic construct
  source 1..63: mol_type = other RNA
aaaaaaaaaaaaaaaaaaaaaaaaaaaaaaaaaaaaaaaaaaaaaaaaaaaaaaataaatata

SEQ ID NO: 10295 - RNA, 63 nt, synthetic construct
  source 1..63: mol_type = other RNA
aaaaaaaaaaaaaaaaaaaaaaaaaaaaaaaaaaaaaaaaaaaaaaaaaaataaataaatata

SEQ ID NO: 10296 - RNA, 63 nt, synthetic construct
  source 1..63: mol_type = other RNA
aaaaaaaaaaaaaaaaaaaaaaaaaaaaaaaaaaaaaaaaaaaaaaataaataaataaatata

SEQ ID NO: 10297 - RNA, 63 nt, synthetic construct
  source 1..63: mol_type = other RNA
aaaaaaaaaaaaaaaaaaaaaaaaaaaaaaaaaaaaaaaaaaaaaaaaatataaataaatata

SEQ ID NO: 10298 - RNA, 63 nt, synthetic construct
  source 1..63: mol_type = other RNA
aaaaaaaaaaaaaaaaaaaaaaaaaaaaaaaaaaaaaaaaaaaaatataaataaataaatata

SEQ ID NO: 10299 - RNA, 63 nt, synthetic construct
  source 1..63: mol_type = other RNA
aaaaaaaaaaaaaaaaaaaaaaaaaaaaaaaaaaaaaaaaataaatataaataaataaatata

SEQ ID NO: 10300 - RNA, 63 nt, synthetic construct
  source 1..63: mol_type = other RNA
aaaaaaaaaaaaaaaaaaaaaaaaaaaaaaaaaaaaataaataaatataaataaataaatata

SEQ ID NO: 10301 - RNA, 63 nt, synthetic construct
  source 1..63: mol_type = other RNA
aaataaaaaaaaaaaaaaaaaaaaaaaaaaaaaaaaaaaaaaaaaaaaaaaaaaaaaaatata

SEQ ID NO: 10302 - RNA, 63 nt, synthetic construct
  source 1..63: mol_type = other RNA
aaataaaaaaaaaaaaaaaaaaaaaaaaaaaaaaaaaaaaaaaaaaaaaaaaaaataaatata

SEQ ID NO: 10303 - RNA, 63 nt, synthetic construct
  source 1..63: mol_type = other RNA
aaataaataaaaaaaaaaaaaaaaaaaaaaaaaaaaaaaaaaaaaaaaaaaaaaaaaaatata

SEQ ID NO: 10304 - RNA, 63 nt, synthetic construct
  source 1..63: mol_type = other RNA
aaataaataaaaaaaaaaaaaaaaaaaaaaaaaaaaaaaaaaaaaaaaaaaaaaataaatata

SEQ ID NO: 10305 - RNA, 63 nt, synthetic construct
  source 1..63: mol_type = other RNA
aaataaaaaaaaaaaaaaaaaaaaaaaaaaaaaaaaaaaaaaaaaaaaaaataaataaatata

SEQ ID NO: 10306 - RNA, 63 nt, synthetic construct
  source 1..63: mol_type = other RNA
aaaaaaaaaaaaaaaaaaaaaaaaaaaaaaaaaaaaaaaaaaaaaaaaaaaaaaaaaaaataa

SEQ ID NO: 10307 - RNA, 63 nt, synthetic construct
  source 1..63: mol_type = other RNA
aaaaaaaaaaaaaaaaaaaaaaaaaaaaaaaaaaaaaaaaaaaaaaaaataaataaatatata

SEQ ID NO: 10308 - RNA, 63 nt, synthetic construct
  source 1..63: mol_type = other RNA
aaaaaaaaaaaaaaaaaaaaaaaaaaaaaaaaaaaaaaaaaaaaaaaaaaaaaaaataaataa

SEQ ID NO: 10309 - RNA, 63 nt, synthetic construct
  source 1..63: mol_type = other RNA
aaataaataaaaaaaaaaaaaaaaaaaaaaaaaaataaataaataaataaataaataaatata

SEQ ID NO: 10310 - RNA, 63 nt, synthetic construct
  source 1..63: mol_type = other RNA
aaataaataaaaaaaaaaaaaaaaaaaaaaataaataaataaataaataaataaataaatata

SEQ ID NO: 10311 - RNA, 63 nt, synthetic construct
  source 1..63: mol_type = other RNA
aaataaataaaaaaaaaaaaaaaaaaataaataaataaataaataaataaataaataaatata

SEQ ID NO: 10312 - RNA, 63 nt, synthetic construct
  source 1..63: mol_type = other RNA
aaaaaaaaaaaaaaaaaaaaaaaaaaaaaaaaaaaaaaaaaaaaaaataaataaataaataaa

SEQ ID NO: 10313 - RNA, 63 nt, synthetic construct
  source 1..63: mol_type = other RNA
aaataaaaaaaaaaaaaaaaaaaaaaaaaaaaaaaaaaaaataaatataaataaataaatata

SEQ ID NO: 10314 - RNA, 63 nt, synthetic construct
  source 1..63: mol_type = other RNA
aaaaaaaaaaaaaaaaaaaaaaaaaaaaaaaaaaaaaaaaaaaaaaaaaaaaaaaaaatataa

SEQ ID NO: 10315 - RNA, 63 nt, synthetic construct
  source 1..63: mol_type = other RNA
aaataaaaaaaaaaaaaaaaaaaaaaaaaaaaaaaaataaataaatataaataaataaatata

SEQ ID NO: 10316 - RNA, 63 nt, synthetic construct
  source 1..63: mol_type = other RNA
aaaaaaaaaaaaaaaaaaaaaaaaaaaaaaaaaaaaaaaaaaaaaaaaaaaaataaatataaa

SEQ ID NO: 10317 - RNA, 63 nt, synthetic construct
  source 1..63: mol_type = other RNA
aaataaaaaaaaaaaaaaaaaaaaaaaaaaaaaaaaaaaaaaaaaaaaaaaaaaaaatatata

SEQ ID NO: 10318 - RNA, 63 nt, synthetic construct
  source 1..63: mol_type = other RNA
aaaaaaaaaaaaaaaaaaaaaaaaaaaaaaaaaaaaaaaaaaaaaaaaataaataaatataaa

SEQ ID NO: 10319 - RNA, 63 nt, synthetic construct
  source 1..63: mol_type = other RNA
aaataaaaaaaaaaaaaaaaaaaaaaaaaaaaaaaaaaaaaaaaaaaaaaaaataaatatata

SEQ ID NO: 10320 - RNA, 63 nt, synthetic construct
  source 1..63: mol_type = other RNA
aaaaaaaaaaaaaaaaaaaaaaaaaaaaaaaaaaaaaaaaaaaaatataaataaataaataaa

SEQ ID NO: 10321 - RNA, 63 nt, synthetic construct
  source 1..63: mol_type = other RNA
aaataaaaaaaaaaaaaaaaaaaaaaaaaaaaaaaaaaaaaaaaaaaaaaaaaaaaaaataaa

SEQ ID NO: 10322 - RNA, 63 nt, synthetic construct
  source 1..63: mol_type = other RNA
aaataaataaaaaaaaaaaaaaaaaaaaaaaaaaaaaaaaaaaaaaaaaaaaaaaaaaataaa

SEQ ID NO: 10323 - RNA, 63 nt, synthetic construct
  source 1..63: mol_type = other RNA
aaaaaaaaaaaaaaaaaataaaaaaaaaaaaaaaaaaaaaaaaaaaaaaaaaaaaaaaatata

SEQ ID NO: 10324 - RNA, 63 nt, synthetic construct
  source 1..63: mol_type = other RNA
aaaaaaaaaaaaaaaaaaaaaaaaaaaaaaaaaaaaaaaaaaaaaaaataaaaaaaaaatata

SEQ ID NO: 10325 - RNA, 63 nt, synthetic construct
  source 1..63: mol_type = other RNA
aaaaaaaaaaaaaaaaaaaaaaaaaaaaaaaaaaaaaaaaataaaaaaaaaaaaaaaaatata

SEQ ID NO: 10326 - RNA, 63 nt, synthetic construct
  source 1..63: mol_type = other RNA
aaaaaaaaaaaaaaaaaaaaaaaaaataaaaaaaaaaaaaaaaaaaaaaaaaaaaaaaatata

SEQ ID NO: 10327 - RNA, 63 nt, synthetic construct
  source 1..63: mol_type = other RNA
aaaaaaaaaaaaaaaaaaaaaataaaaaaaaaaaaaaaaaaaaaaaaaaaaaaaaaaaatata

SEQ ID NO: 10328 - RNA, 63 nt, synthetic construct
  source 1..63: mol_type = other RNA
aaaaaaaaaaaaaaaaaaaaaaaaaaaataaaaaaaaaaaaaaaaaaaaaaaaaaaaaatata

SEQ ID NO: 10329 - RNA, 63 nt, synthetic construct
  source 1..63: mol_type = other RNA
aaaaaaaaaaaaaaaaaaaaaaaataaaaaaaaaaaaaaaaaaaaaaaaaaaaaaaaaatata

SEQ ID NO: 10330 - RNA, 63 nt, synthetic construct
  source 1..63: mol_type = other RNA
aaaaaaataaaaaaaaaaaaaaaaaaaaaaaaaaaaaaaaaaaaaaaaaaaaaaaaaaatata

SEQ ID NO: 10331 - RNA, 63 nt, synthetic construct
  source 1..63: mol_type = other RNA
aaaaaaaaaaaaaaaaataaaaaaaaaaaaaaaaaaaaaaaaaaaaaaaaaaaaaaaaatata

SEQ ID NO: 10332 - RNA, 63 nt, synthetic construct
  source 1..63: mol_type = other RNA
aaaaaaaaaaaaaaaaaaaaaaaaaaaaaaaaaaaaataaaaaaaaaaaaaaaaaaaaatata

SEQ ID NO: 10333 - RNA, 63 nt, synthetic construct
  source 1..63: mol_type = other RNA
aaaaaaaaaaaaaaaaaaaaaaataaaaaaaaaaaaaaaaaaaaaaaaaaaaaaaaaaatata

SEQ ID NO: 10334 - RNA, 63 nt, synthetic construct
  source 1..63: mol_type = other RNA
aaaaaaaaaaaaaaaaaaaaaaaaaaaaaaaaaaaaaaaaaaaataaaaaaaaaaaaaatata

SEQ ID NO: 10335 - RNA, 63 nt, synthetic construct
  source 1..63: mol_type = other RNA
aaaaaaaaaaaaaaaaaaaaaaaaaaaaaaaaaaaaaaaaaaaaaaataaaaaaaaaaatata

SEQ ID NO: 10336 - RNA, 63 nt, synthetic construct
  source 1..63: mol_type = other RNA
aaaaaaaaaaaataaaaaaaaaaaaaaaaaaaaaaaaaaaaaaaaaaaaaaaaaaaaaatata

SEQ ID NO: 10337 - RNA, 63 nt, synthetic construct
  source 1..63: mol_type = other RNA
aaaaaaaaaaataaaaaaaaaaaaaaaaaaaaaaaaaaaaaaaaaaaaaaaaaaaaaaatata

SEQ ID NO: 10338 - RNA, 63 nt, synthetic construct
  source 1..63: mol_type = other RNA
aaaaaaaaaaaaaaaaaaaaaaaaaaaaaaaaaaataaaaaaaaaaaaaaaaaaaaaaatata

SEQ ID NO: 10339 - RNA, 63 nt, synthetic construct
  source 1..63: mol_type = other RNA
aaaaaaaaaaaaaaaataaaaaaaaaaaaaaaaaaaaaaaaaaaaaaaaaaaaaaaaaatata

SEQ ID NO: 10340 - RNA, 63 nt, synthetic construct
  source 1..63: mol_type = other RNA
aaaaaaaaaaaaaaaaaaaaaaaaaaaaaaaaaaaaaaaaaaataaaaaaaaaaaaaaatata

SEQ ID NO: 10341 - RNA, 63 nt, synthetic construct
  source 1..63: mol_type = other RNA
aaaaaataaaaaaaaaaaaaaaaaaaaaaaaaaaaaaaaaaaaaaaaaaaaaaaaaaaatata

SEQ ID NO: 10342 - RNA, 63 nt, synthetic construct
  source 1..63: mol_type = other RNA
aaaaaaaaaaaaaataaaaaaaaaaaaaaaaaaaaaaaaaaaaaaaaaaaaaaaaaaaatata

SEQ ID NO: 10343 - RNA, 63 nt, synthetic construct
  source 1..63: mol_type = other RNA
aaaaaaaaaaaaaaaaaaataaaaaaaaaaaaaaaaaaaaaaaaaaaaaaaaaaaaaaatata

SEQ ID NO: 10344 - RNA, 63 nt, synthetic construct
  source 1..63: mol_type = other RNA
aaaaaaaaaaaaaaaaaaaaaaaaaaaaaaaataaaaaaaaaaaaaaaaaaaaaaaaaatata

SEQ ID NO: 10345 - RNA, 63 nt, synthetic construct
  source 1..63: mol_type = other RNA
aaaaaaaaaaaaaaaaaaaaaaaaaaaaaaaaaaaaaaaaaaaaaaaaaaaataaaaaatata

SEQ ID NO: 10346 - RNA, 63 nt, synthetic construct
  source 1..63: mol_type = other RNA
aaaaaaaaaaaaaaaaaaaaaaaaaaaaaaaaaaaaaaaaaaaaaaaaaataaaaaaaatata

SEQ ID NO: 10347 - RNA, 63 nt, synthetic construct
  source 1..63: mol_type = other RNA
aaaaaaaaaaaaaaaaaaaaaaaaaaaaaaaaaaaataaaaaaaaaaaaaaaaaaaaaatata

SEQ ID NO: 10348 - RNA, 63 nt, synthetic construct
  source 1..63: mol_type = other RNA
aaaaataaaaaaaaaaaaaaaaaaaaaaaaaaaaaaaaaaaaaaaaaaaaaaaaaaaaatata

SEQ ID NO: 10349 - RNA, 63 nt, synthetic construct
  source 1..63: mol_type = other RNA
aaaaaaaaaaaaaaaaaaaaaaaaaaaaaataaaaaaaaaaaaaaaaaaaaaaaaaaaatata

SEQ ID NO: 10350 - RNA, 63 nt, synthetic construct
  source 1..63: mol_type = other RNA
aaaaaaaaaaaaaataaataaaaaaaaaaaaaaaaaaaaaaaaaaaaaaaaaaaaaaaatata

SEQ ID NO: 10351 - RNA, 63 nt, synthetic construct
  source 1..63: mol_type = other RNA
aaaaaaaaaaaaaaaaaataaaaaaaaaaaaaaaaaaaaaaaaaaaaaaaaaaaataaatata

SEQ ID NO: 10352 - RNA, 63 nt, synthetic construct
  source 1..63: mol_type = other RNA
aaaaaaaaaaaaaaaaaaaaaaaaaaaaaaaaaaaaaaaaaaaataaataaaaaaaaaatata

SEQ ID NO: 10353 - RNA, 63 nt, synthetic construct
  source 1..63: mol_type = other RNA
aaaaaaaaaaaaaaaaaaaaaaaaaaaaaaaaaaaaataaataaaaaaaaaaaaaaaaatata

SEQ ID NO: 10354 - RNA, 63 nt, synthetic construct
  source 1..63: mol_type = other RNA
aaaaaaaaaaaaaaaaaaaaaataaataaaaaaaaaaaaaaaaaaaaaaaaaaaaaaaatata

SEQ ID NO: 10355 - RNA, 63 nt, synthetic construct
  source 1..63: mol_type = other RNA
aaaaaaaaaaaaaaaaaaaaaaaaaataaaaaaaaaaaaaaaaaaaaaaaaaaaataaatata

SEQ ID NO: 10356 - RNA, 63 nt, synthetic construct
  source 1..63: mol_type = other RNA
aaaaaaaaaaaaaaaaaaaaaaaataaataaaaaaaaaaaaaaaaaaaaaaaaaaaaaatata

SEQ ID NO: 10357 - RNA, 63 nt, synthetic construct
  source 1..63: mol_type = other RNA
aaaaaaaaaaaaaaaaaaaaaataaaaaaaaaaaaaaaaaaaaaaaaaaaaaaaataaatata

SEQ ID NO: 10358 - RNA, 63 nt, synthetic construct
  source 1..63: mol_type = other RNA
aaaaaaaaaaaaaaaaaaaaaaaaaaaataaaaaaaaaaaaaaaaaaaaaaaaaataaatata

SEQ ID NO: 10359 - RNA, 63 nt, synthetic construct
  source 1..63: mol_type = other RNA
aaaaaataaaaaaaaaaaaaaaaaaaaaaaaaaaaaaaaaaaaaaaaaaaaaaaataaatata

SEQ ID NO: 10360 - RNA, 63 nt, synthetic construct
  source 1..63: mol_type = other RNA
aaaaaaaaaaaaaaaaaaaaaaaaaataaataaaaaaaaaaaaaaaaaaaaaaaaaaaatata

SEQ ID NO: 10361 - RNA, 63 nt, synthetic construct
  source 1..63: mol_type = other RNA
aaaaaaaaaaaaaaaaaaaaataaaaaaaaaaaaaaaaaaaaaaaaaaaaataaataaatata

SEQ ID NO: 10362 - RNA, 63 nt, synthetic construct
  source 1..63: mol_type = other RNA
aaaaaaaaaaaaaaaaaaaaaaaaaaaaataaaaaaaaaaaaaaaaaaaaataaataaatata

SEQ ID NO: 10363 - RNA, 63 nt, synthetic construct
  source 1..63: mol_type = other RNA
aaaaaaaaaaaaaaaaaaaaaaaaaaaaaaaaaaaataaaaaaaaaaaaaataaataaatata

SEQ ID NO: 10364 - RNA, 63 nt, synthetic construct
  source 1..63: mol_type = other RNA
aaaaaaaaaaaaaaaaaaaaaaaaataaaaaaaaaaaaaaaaaaaaaaaaataaataaatata

SEQ ID NO: 10365 - RNA, 63 nt, synthetic construct
  source 1..63: mol_type = other RNA
aaaaaaataaaaaaaaaaaaaaaaaaaaaaaaaaaaaaaaaaaaaaaaaaataaataaatata

SEQ ID NO: 10366 - RNA, 63 nt, synthetic construct
  source 1..63: mol_type = other RNA
aaaaaaaaaaaaataaaaaaaaaaaaaaaaaaaaaaaaaaaaaaaaaaaaataaataaatata

SEQ ID NO: 10367 - RNA, 63 nt, synthetic construct
  source 1..63: mol_type = other RNA
aaaaaaaaaataaataaataaaaaaaaaaaaaaaaaaaaaaaaaaaaaaaaaaaaaaaatata

SEQ ID NO: 10368 - RNA, 63 nt, synthetic construct
  source 1..63: mol_type = other RNA
aaaaaaaaaaaaaaaaaataaaaaaaaaaaaaaaaaaaaaaaaaaaaaaaataaataaatata

SEQ ID NO: 10369 - RNA, 63 nt, synthetic construct
  source 1..63: mol_type = other RNA
aaaaaaaaaaaaaataaataaaaaaaaaaaaaaaaaaaaaaaaaaaaaaaaaaaataaatata

SEQ ID NO: 10370 - RNA, 63 nt, synthetic construct
  source 1..63: mol_type = other RNA
aaaaaaaaaaaaaaaaaaaaaaaaaaaaaaaaaaaaaaaataaataaataaaaaaaaaatata

SEQ ID NO: 10371 - RNA, 63 nt, synthetic construct
  source 1..63: mol_type = other RNA
aaaaaaaaaaaaaaaaaaaaaaaaaaaaaaaaataaataaataaaaaaaaaaaaaaaaatata

SEQ ID NO: 10372 - RNA, 63 nt, synthetic construct
  source 1..63: mol_type = other RNA
aaaaaaaaaaaaaaaaaaaaaataaataaaaaaaaaaaaaaaaaaaaaaaaaaaataaatata

SEQ ID NO: 10373 - RNA, 63 nt, synthetic construct
  source 1..63: mol_type = other RNA
aaaaaaaaaaaaaaaaaaaaaaaataaataaaaaaaaaaaaaaaaaaaaaaaaaataaatata

SEQ ID NO: 10374 - RNA, 63 nt, synthetic construct
  source 1..63: mol_type = other RNA
aaaaaaaaaaaaaaaaaaaaaaaaaaaaaaaaaaaaataaaaaaaaaaaaataaataaatata

SEQ ID NO: 10375 - RNA, 63 nt, synthetic construct
  source 1..63: mol_type = other RNA
aaaaaaaaaaaaaaaaaaaaaaaaaaaaaaaaaaaaataaataaaaaaaaaaaaataaatata

SEQ ID NO: 10376 - RNA, 63 nt, synthetic construct
  source 1..63: mol_type = other RNA
aaaaaaaaaaaaaaaaaaaaaataaaaaaaaaaaaaaaaaaaaaaaaaaaataaataaatata

SEQ ID NO: 10377 - RNA, 63 nt, synthetic construct
  source 1..63: mol_type = other RNA
aaaaaaaaaaaaaaaaaaaaaaaaaaaaaaaaaaaaaaaaataaaaaaaaataaataaatata

SEQ ID NO: 10378 - RNA, 63 nt, synthetic construct
  source 1..63: mol_type = other RNA
aaaaaaaaaaaaaaaaaaaaaaaaaaaaaaaaaaaaaaaaaaaaataaaaataaataaatata

SEQ ID NO: 10379 - RNA, 63 nt, synthetic construct
  source 1..63: mol_type = other RNA
aaaaaaaaaaaaaaaaaaaaaaaaaaaaaaaaaataaaaaaaaaaaaaaaataaataaatata

SEQ ID NO: 10380 - RNA, 63 nt, synthetic construct
  source 1..63: mol_type = other RNA
aaaaaaaaaaaaaaaaaaaaaaaaaaaaaaaaaaaaaaaaaaaataaaaaataaataaatata

SEQ ID NO: 10381 - RNA, 63 nt, synthetic construct
  source 1..63: mol_type = other RNA
aaaaaaaaaaaaaaaaaaaaaaaaaaaaaaaaataaaaaaaaaaaaaaaaataaataaatata

SEQ ID NO: 10382 - RNA, 63 nt, synthetic construct
  source 1..63: mol_type = other RNA
aaaaaaaaaaaaaaaaaaaaaaaaaaaaaataaaaaaaaaaaaaaaaaaaataaataaatata

SEQ ID NO: 10383 - RNA, 63 nt, synthetic construct
  source 1..63: mol_type = other RNA
aaaaaaaaaaaaaaaaaaaaaaaaaaaaaaaaaaaaaataaaaaaaaaaaataaataaatata

SEQ ID NO: 10384 - RNA, 63 nt, synthetic construct
  source 1..63: mol_type = other RNA
aaaaaaaaaaaataaaaaaaaaaaaaaaaaaaaaaaaaaaaaaaaaaaaaataaataaatata

SEQ ID NO: 10385 - RNA, 63 nt, synthetic construct
  source 1..63: mol_type = other RNA
aaaaaaaaataaaaaaaaaaaaaaaaaaaaaaaaaaaaaaaaaaaaaaaaataaataaatata

SEQ ID NO: 10386 - RNA, 63 nt, synthetic construct
  source 1..63: mol_type = other RNA
aaaaaaaaaaaaaaaaaaaaaaaaaataaataaaaaaaaaaaaaaaaaaaaaaaataaatata

SEQ ID NO: 10387 - RNA, 63 nt, synthetic construct
  source 1..63: mol_type = other RNA
aaaaaaaaaaaaaaaaaaaaaaaaaataaataaataaaaaaaaaaaaaaaaaaaaaaaatata

SEQ ID NO: 10388 - RNA, 63 nt, synthetic construct
  source 1..63: mol_type = other RNA
aaaaaaaaaaaaaataaataaaaaaaaaaaaaaaaaaaaaaaaaaaaaaaataaataaatata

SEQ ID NO: 10389 - RNA, 63 nt, synthetic construct
  source 1..63: mol_type = other RNA
aaaaaaaaaaaaaataaataaataaaaaaaaaaaaaaaaaaaaaaaaaaaaaaaataaatata

SEQ ID NO: 10390 - RNA, 63 nt, synthetic construct
  source 1..63: mol_type = other RNA
aaaaaaaaaataaataaataaaaaaaaaaaaaaaaaaaaaaaaaaaaaaaaaaaataaatata

SEQ ID NO: 10391 - RNA, 63 nt, synthetic construct
  source 1..63: mol_type = other RNA
aaaaaaaaaaaaaaaaaaaaaaaaaaaaataaataaataaataaaaaaaaaaaaaaaaatata

SEQ ID NO: 10392 - RNA, 63 nt, synthetic construct
  source 1..63: mol_type = other RNA
aaaaaaaaaaaaataaataaataaataaaaaaaaaaaaaaaaaaaaaaaaaaaaaaaaatata

SEQ ID NO: 10393 - RNA, 63 nt, synthetic construct
  source 1..63: mol_type = other RNA
aaaaaaaaaaaaaaaaaataaataaaaaaaaaaaaaaaaaaaaaaaaaaaataaataaatata

SEQ ID NO: 10394 - RNA, 63 nt, synthetic construct
  source 1..63: mol_type = other RNA
aaaaaaaaaaaaaaaaaaaaaaaaaaaaaaaaaaaaataaataaaaaaaaataaataaatata

SEQ ID NO: 10395 - RNA, 63 nt, synthetic construct
  source 1..63: mol_type = other RNA
aaaaaaaaaaaaaaaaaaaaaataaaaaaaaaaaaaaaaaaaaaaaataaataaataaatata

SEQ ID NO: 10396 - RNA, 63 nt, synthetic construct
  source 1..63: mol_type = other RNA
aaaaaaaaaaaaaaaaaaaaaaaaaaaaaaaaaaaaataaaaaaaaataaataaataaatata

SEQ ID NO: 10397 - RNA, 63 nt, synthetic construct
  source 1..63: mol_type = other RNA
aaaaaaaaaaaaaaaaaaaaaaaaaaaaaaaaaaaaaaaaataaataaaaataaataaatata

SEQ ID NO: 10398 - RNA, 63 nt, synthetic construct
  source 1..63: mol_type = other RNA
aaaaaaaaaaaaaaaaaaaaaaaaaaaaaaaaaaaaaaaaataaaaataaataaataaatata

SEQ ID NO: 10399 - RNA, 63 nt, synthetic construct
  source 1..63: mol_type = other RNA
aaaaaaaaaaaaaaaaaaaaataaataaaaaaaaaaaaaaaaaaaaaaaaataaataaatata

SEQ ID NO: 10400 - RNA, 63 nt, synthetic construct
  source 1..63: mol_type = other RNA
aaaaaaaaaaaaaaaaataaataaaaaaaaaaaaaaaaaaaaaaaaaaaaataaataaatata

SEQ ID NO: 10401 - RNA, 63 nt, synthetic construct
  source 1..63: mol_type = other RNA
aaaaaaaaaaaaaaaaaaaaaaaaaataaataaataaaaaaaaaaaaaaaaaaaataaatata

SEQ ID NO: 10402 - RNA, 63 nt, synthetic construct
  source 1..63: mol_type = other RNA
aaaaaaaaaaaaaaaaaaaaaaaaaataaataaaaaaaaaaaaaaaaaaaataaataaatata

SEQ ID NO: 10403 - RNA, 64 nt, synthetic construct
  source 1..64: mol_type = other RNA
aaaaaaaaaaaaaaaaaaaaaaaaaaaaaaaaaaaaaaaaaaaaaaaaaaaaaaaaaaaatata

SEQ ID NO: 10404 - RNA, 64 nt, synthetic construct
  source 1..64: mol_type = other RNA
aaaaaaaaaaaaaaaaaaaaaaaaaaaaaaaaaaaaaaaaaaaaaaaaaaaaaaaataaatata

SEQ ID NO: 10405 - RNA, 64 nt, synthetic construct
  source 1..64: mol_type = other RNA
aaaaaaaaaaaaaaaaaaaaaaaaaaaaaaaaaaaaaaaaaaaaaaaaaaaataaataaatata

SEQ ID NO: 10406 - RNA, 64 nt, synthetic construct
  source 1..64: mol_type = other RNA
aaaaaaaaaaaaaaaaaaaaaaaaaaaaaaaaaaaaaaaaaaaaaaaataaataaataaatata

SEQ ID NO: 10407 - RNA, 64 nt, synthetic construct
  source 1..64: mol_type = other RNA
aaaaaaaaaaaaaaaaaaaaaaaaaaaaaaaaaaaaaaaaaaaaaaaaaatataaataaatata

SEQ ID NO: 10408 - RNA, 64 nt, synthetic construct
  source 1..64: mol_type = other RNA
aaaaaaaaaaaaaaaaaaaaaaaaaaaaaaaaaaaaaaaaaaaaaataaatataaataaatata

SEQ ID NO: 10409 - RNA, 64 nt, synthetic construct
  source 1..64: mol_type = other RNA
aaaaaaaaaaaaaaaaaaaaaaaaaaaaaaaaaaaaaaaaaaaaaatataaataaataaatata

SEQ ID NO: 10410 - RNA, 64 nt, synthetic construct
  source 1..64: mol_type = other RNA
aaaaaaaaaaaaaaaaaaaaaaaaaaaaaaaaaaaaaaaaaataaataaatataaataaatata

SEQ ID NO: 10411 - RNA, 64 nt, synthetic construct
  source 1..64: mol_type = other RNA
aaataaaaaaaaaaaaaaaaaaaaaaaaaaaaaaaaaaaaaaaaaaaaaaaaaaaaaaaatata

SEQ ID NO: 10412 - RNA, 64 nt, synthetic construct
  source 1..64: mol_type = other RNA
aaaaaaaaaaaaaaaaaaaaaaaaaaaaaaaaaatataaataaataaataaataaataaatata

SEQ ID NO: 10413 - RNA, 64 nt, synthetic construct
  source 1..64: mol_type = other RNA
aaataaaaaaaaaaaaaaaaaaaaaaaaaaaaaaaaaaaaaaaaaaaaaaaaaaaataaatata

SEQ ID NO: 10414 - RNA, 64 nt, synthetic construct
  source 1..64: mol_type = other RNA
aaaaaaaaaaaaaaaaaaaaaaaaaaaaaataaatataaataaataaataaataaataaatata

SEQ ID NO: 10415 - RNA, 64 nt, synthetic construct
  source 1..64: mol_type = other RNA
aaataaataaaaaaaaaaaaaaaaaaaaaaaaaaaaaaaaaaaaaaaaaaaaaaaataaatata

SEQ ID NO: 10416 - RNA, 64 nt, synthetic construct
  source 1..64: mol_type = other RNA
aaaaaaaaaaaaaaaaaaaaaaaaaataaataaatataaataaataaataaataaataaatata

SEQ ID NO: 10417 - RNA, 64 nt, synthetic construct
  source 1..64: mol_type = other RNA
aaataaataaataaaaaaaaaaaaaaaaaaaaaaaaaaaaaaaaaaaaaaaaaaaataaatata

SEQ ID NO: 10418 - RNA, 64 nt, synthetic construct
  source 1..64: mol_type = other RNA
aaaaaaaaaaaaaaaaaaaaaataaataaataaatataaataaataaataaataaataaatata

SEQ ID NO: 10419 - RNA, 64 nt, synthetic construct
  source 1..64: mol_type = other RNA
aaataaataaataaaaaaaaaaaaaaaaaaaaaaaaaaaaaaaaaaaaaaaataaataaatata

SEQ ID NO: 10420 - RNA, 64 nt, synthetic construct
  source 1..64: mol_type = other RNA
aaataaataaataaataaaaaaaaaaaaaaaaaaaaaaaaaaaaaaaaaaaaaaaataaatata

SEQ ID NO: 10421 - RNA, 64 nt, synthetic construct
  source 1..64: mol_type = other RNA
aaaaaaaaaaaaaaaaaaaaaaaaaaaaaaaaaaaaaaaaaaaaaaaaaaaaaaaaaaaaataa

SEQ ID NO: 10422 - RNA, 64 nt, synthetic construct
  source 1..64: mol_type = other RNA
aaataaataaataaaaaaaaaaaaaaaaaaaaaaaaaaaaaaaaaaaataaataaataaatata

SEQ ID NO: 10423 - RNA, 64 nt, synthetic construct
  source 1..64: mol_type = other RNA
aaataaataaaaaaaaaaaaaaaaaaaaaaaaaaaaaaaaaaaataaataaataaataaatata

SEQ ID NO: 10424 - RNA, 64 nt, synthetic construct
  source 1..64: mol_type = other RNA
aaataaataaataaataaaaaaaaaaaaaaaaaaaaaaaaaaaaaaaaaaaataaataaatata

SEQ ID NO: 10425 - RNA, 64 nt, synthetic construct
  source 1..64: mol_type = other RNA
aaataaataaataaataaataaaaaaaaaaaaaaaaaaaaaaaaaaaaaaaaaaaataaatata

SEQ ID NO: 10426 - RNA, 64 nt, synthetic construct
  source 1..64: mol_type = other RNA
aaataaataaaaaaaaaaaaaaaaaaaaaaaaaaaaaaaataaataaataaataaataaatata

SEQ ID NO: 10427 - RNA, 64 nt, synthetic construct
  source 1..64: mol_type = other RNA
aaataaataaataaaaaaaaaaaaaaaaaaaaaaaaaaaaaaaataaataaataaataaatata

SEQ ID NO: 10428 - RNA, 64 nt, synthetic construct
  source 1..64: mol_type = other RNA
aaataaataaataaataaataaaaaaaaaaaaaaaaaaaaaaaaaaaaaaaataaataaatata

SEQ ID NO: 10429 - RNA, 64 nt, synthetic construct
  source 1..64: mol_type = other RNA
aaataaataaataaataaaaaaaaaaaaaaaaaaaaaaaaaaaaaaaataaataaataaatata

SEQ ID NO: 10430 - RNA, 64 nt, synthetic construct
  source 1..64: mol_type = other RNA
aaaaaaaaaaaaaaaaaaaaaaaaaaaaaaaaaaaaaaaaaaaaaaaaaaaaataaataaataa

SEQ ID NO: 10431 - RNA, 64 nt, synthetic construct
  source 1..64: mol_type = other RNA
aaataaataaataaataaataaaaaaaaaaaaaaaaaaaaaaaaaaaataaataaataaatata

SEQ ID NO: 10432 - RNA, 64 nt, synthetic construct
  source 1..64: mol_type = other RNA
aaaaaaaaaaaaaaaaaaaaaaaaaaaaaaaaaaaaaaaaaaaaaaaaaaaaaaaaaaaataaa

SEQ ID NO: 10433 - RNA, 64 nt, synthetic construct
  source 1..64: mol_type = other RNA
aaaaaaaaaaaaaaaaaaaaaaaaaaaaaaaaaaaaaaaaaaaaaaaaataaataaataaataa

SEQ ID NO: 10434 - RNA, 64 nt, synthetic construct
  source 1..64: mol_type = other RNA
aaaaaaaaaaaaaaaaaaaaaaaaaaaaaaaaaaaaaaaaaaaaaaaaaaaaaaaataaataaa

SEQ ID NO: 10435 - RNA, 64 nt, synthetic construct
  source 1..64: mol_type = other RNA
aaaaaaaaaaaaaaaaaaaaaaaaaaaaaaaaaaaaaaaaaaaaaaaaaaaataaataaataaa

SEQ ID NO: 10436 - RNA, 64 nt, synthetic construct
  source 1..64: mol_type = other RNA
aaaaaaaaaaaaaaaaaaaaaaaaaaaaaaaaaaaaaaaaaaaaaaaataaataaataaataaa

SEQ ID NO: 10437 - RNA, 64 nt, synthetic construct
  source 1..64: mol_type = other RNA
aaaaaaaaaaaaaaaaaaaaaaaaaaaaaaaaaaaaaaaaaaaaaaaaaaaaataaataaatat

SEQ ID NO: 10438 - RNA, 64 nt, synthetic construct
  source 1..64: mol_type = other RNA
aaatataaaaaaaaaaaaaaaaaaaaaaaaaaaaaaaaaaaaaaaaaaaaaaaaaaaaaatata

SEQ ID NO: 10439 - RNA, 64 nt, synthetic construct
  source 1..64: mol_type = other RNA
aaatataaataaaaaaaaaaaaaaaaaaaaaaaaaaaaaaaaaaaaaaaaaaaaaaaaaatata

SEQ ID NO: 10440 - RNA, 64 nt, synthetic construct
  source 1..64: mol_type = other RNA
aaaaaaaaaaaaaaaaaaaaaaaaaaaatataaatataaataaataaataaataaataaatata

SEQ ID NO: 10441 - RNA, 64 nt, synthetic construct
  source 1..64: mol_type = other RNA
aaatataaataaataaaaaaaaaaaaaaaaaaaaaaaaaaaaaaaaaaaaaaaaaaaaaatata

SEQ ID NO: 10442 - RNA, 64 nt, synthetic construct
  source 1..64: mol_type = other RNA
aaatataaataaataaataaaaaaaaaaaaaaaaaaaaaaaaaaaaaaaaaaaaaataaatata

SEQ ID NO: 10443 - RNA, 64 nt, synthetic construct
  source 1..64: mol_type = other RNA
aaataaataaatataaaaaaaaaaaaaaaaaaaaaaaaaaaaaaaaaataaataaataaatata

SEQ ID NO: 10444 - RNA, 64 nt, synthetic construct
  source 1..64: mol_type = other RNA
aaataaataaaaaaaaaaaaaaaaaaaaaaaaaaaaaaaaaatataaataaataaataaatata

SEQ ID NO: 10445 - RNA, 64 nt, synthetic construct
  source 1..64: mol_type = other RNA
aaataaataaataaaaaaaaaaaaaaaaaaaaaaaaaaaaaaaaaatataaataaataaatata

SEQ ID NO: 10446 - RNA, 64 nt, synthetic construct
  source 1..64: mol_type = other RNA
aaaaaaaaaaaaaaaaaaaaaaaaaaaaaaaaaaaaaaaaaaaaaaaatatataaataaatata

SEQ ID NO: 10447 - RNA, 64 nt, synthetic construct
  source 1..64: mol_type = other RNA
aaataaataaatataaaaaaaaaaaaaaaaaaaaaaaaaaaaaataaataaataaataaatata

SEQ ID NO: 10448 - RNA, 64 nt, synthetic construct
  source 1..64: mol_type = other RNA
aaataaataaataaataaaaaaaaaaaaaaaaaaaaaaaaaaaaaatataaataaataaatata

SEQ ID NO: 10449 - RNA, 64 nt, synthetic construct
  source 1..64: mol_type = other RNA
aaataaataaataaataaataaaaaaaaaaaaaaaaaaaaaaaaaatataaataaataaatata

SEQ ID NO: 10450 - RNA, 64 nt, synthetic construct
  source 1..64: mol_type = other RNA
aaaaaaaaaaaaaaaaaaaaaaaaaaaaaaaaaaaaaaaaaaaaaaaaaatataaataaataaa

SEQ ID NO: 10451 - RNA, 64 nt, synthetic construct
  source 1..64: mol_type = other RNA
aaaaaaaaaaaaaaaaaaaaaaaaaaaaaaaaaaaaaaaaaaaaaaaaaataaataaatataaa

SEQ ID NO: 10452 - RNA, 64 nt, synthetic construct
  source 1..64: mol_type = other RNA
aaaaaaaaaaaaaaaaaaaaaaaaaaaaaaaaaaaaaaaaaaaaaatataaataaataaataaa

SEQ ID NO: 10453 - RNA, 64 nt, synthetic construct
  source 1..64: mol_type = other RNA
aaaaaaaaaaaaaaaaaaaaaaaaaaaaaaaaaaaaaaaaaaaaaataaatataaataaataaa

SEQ ID NO: 10454 - RNA, 64 nt, synthetic construct
  source 1..64: mol_type = other RNA
aaaaaaaaaaaaaaaaaaaaaaaaaaaaaaaaaaaaaaaaaaaaaataaataaataaatataaa

SEQ ID NO: 10455 - RNA, 64 nt, synthetic construct
  source 1..64: mol_type = other RNA
aaaaaaaaaaaaaaaaaaaaaaaaaaaaaaaaaaaaaaaaaataaataaatataaataaataaa

SEQ ID NO: 10456 - RNA, 64 nt, synthetic construct
  source 1..64: mol_type = other RNA
aaaaaaaaaaaaaaaaaaaaaaaaaaaaaaaaaaaaaaaaaataaatataaataaataaataaa

SEQ ID NO: 10457 - RNA, 64 nt, synthetic construct
  source 1..64: mol_type = other RNA
aaataaaaaaaaaaaaaaaaaaaaaaaaaaaaaaaaaaaaaaaaaaaaaaaaataaataaataa

SEQ ID NO: 10458 - RNA, 64 nt, synthetic construct
  source 1..64: mol_type = other RNA
aaaaaaaaaaaaaaaaaaaaaaaaaaataaataaataaatataaataaataaataaataaataa

SEQ ID NO: 10459 - RNA, 64 nt, synthetic construct
  source 1..64: mol_type = other RNA
aaataaataaataaataaataaataaataaaaaaaaaaaaaaaaaaaaaaaaaaaaaaaaataa

SEQ ID NO: 10460 - RNA, 64 nt, synthetic construct
  source 1..64: mol_type = other RNA
aaataaataaataaataaataaataaataaataaaaaaaaaaaaaaaaaaaaaaaaaaaaataa

SEQ ID NO: 10461 - RNA, 64 nt, synthetic construct
  source 1..64: mol_type = other RNA
aaataaataaataaataaaaaaaaaaaaaaaaaataaataaataaataaataaataaatatata

SEQ ID NO: 10462 - RNA, 64 nt, synthetic construct
  source 1..64: mol_type = other RNA
aaataaataaaaaaaaaaaaaaaaaaaaaaaaaaaaaaaaaaaataaataaataaataaataaa

SEQ ID NO: 10463 - RNA, 64 nt, synthetic construct
  source 1..64: mol_type = other RNA
aaataaataaataaataaaaaaaaaaaaaataaataaataaataaataaataaataaatatata

SEQ ID NO: 10464 - RNA, 64 nt, synthetic construct
  source 1..64: mol_type = other RNA
aaataaataaataaataaataaaaaaaaaaaaaataaataaataaataaataaataaatatata

SEQ ID NO: 10465 - RNA, 64 nt, synthetic construct
  source 1..64: mol_type = other RNA
aaataaataaaaaaaaaaaaaaaaaaaaaaaaaaaaaaaataaataaataaataaataaataaa

SEQ ID NO: 10466 - RNA, 64 nt, synthetic construct
  source 1..64: mol_type = other RNA
aaataaataaataaataaataaataaaaaaaaaataaataaataaataaataaataaatatata

SEQ ID NO: 10467 - RNA, 64 nt, synthetic construct
  source 1..64: mol_type = other RNA
aaataaataaataaataaataaaaaaaaaataaataaataaataaataaataaataaatatata

SEQ ID NO: 10468 - RNA, 64 nt, synthetic construct
  source 1..64: mol_type = other RNA
aaataaataaataaataaataaataaaaaataaataaataaataaataaataaataaatatata

SEQ ID NO: 10469 - RNA, 64 nt, synthetic construct
  source 1..64: mol_type = other RNA
aaaaaaaaaaaaaaaaaaaaaaaaaaaaaaaaaaaaaaaaaaaaaaaaaaaataaataaataat

SEQ ID NO: 10470 - RNA, 64 nt, synthetic construct
  source 1..64: mol_type = other RNA
aaaaaaaaaaaaaaaaaaaaaaaaaaaaaaaaaaaaaaaaaaaaaaaataaataaataaataat

SEQ ID NO: 10471 - RNA, 64 nt, synthetic construct
  source 1..64: mol_type = other RNA
aaaaaaaaaataaaaaaaaaaaaaaaaaaaaaaaaaaaaaaaaaaaaaaaaaaaaaaaaatata

SEQ ID NO: 10472 - RNA, 64 nt, synthetic construct
  source 1..64: mol_type = other RNA
aaaaaaaaaaaaaaaaaaaaaaaaaaaaaaaataaaaaaaaaaaaaaaaaaaaaaaaaaatata

SEQ ID NO: 10473 - RNA, 64 nt, synthetic construct
  source 1..64: mol_type = other RNA
aaaaaaaaaaaaaaaaaaaaaaaaaaaaaaaaaaaaaaaaaaaaaaaataaaaaaaaaaatata

SEQ ID NO: 10474 - RNA, 64 nt, synthetic construct
  source 1..64: mol_type = other RNA
aaaaaaaaaaaaaaaaaaaaaaaaaaaaaaaaaaaaaaaaaaaaaaaaaataaaaaaaaatata

SEQ ID NO: 10475 - RNA, 64 nt, synthetic construct
  source 1..64: mol_type = other RNA
aaaaaaaaaaaataaaaaaaaaaaaaaaaaaaaaaaaaaaaaaaaaaaaaaaaaaaaaaatata

SEQ ID NO: 10476 - RNA, 64 nt, synthetic construct
  source 1..64: mol_type = other RNA
aaaaaaaaaaaaaaaaaaaaaaaaaaaaaaaaaaaaaaaaaaaaaataaaaaaaaaaaaatata

SEQ ID NO: 10477 - RNA, 64 nt, synthetic construct
  source 1..64: mol_type = other RNA
aaaaaaaaaaaaaaaaaaaaaaaaaaaaaaaaaaaaaaaaaaaaaaaaaaaataaaaaaatata

SEQ ID NO: 10478 - RNA, 64 nt, synthetic construct
  source 1..64: mol_type = other RNA
aaaaaaataaaaaaaaaaaaaaaaaaaaaaaaaaaaaaaaaaaaaaaaaaaaaaaaaaaatata

SEQ ID NO: 10479 - RNA, 64 nt, synthetic construct
  source 1..64: mol_type = other RNA
aaaaaaaaaaaaaaaaaaaaaaaaaaaaaaaaaaaaaaataaaaaaaaaaaaaaaaaaaatata

SEQ ID NO: 10480 - RNA, 64 nt, synthetic construct
  source 1..64: mol_type = other RNA
aaaaaaaaaaaaaaaaaaaaaaaaaaaaaaaaaaaaaaaaaataaaaaaaaaaaaaaaaatata

SEQ ID NO: 10481 - RNA, 64 nt, synthetic construct
  source 1..64: mol_type = other RNA
aaaaaaaaaaaaaaaaaaaaaaaaaaaaaaaaaaaaaaaaaaaaaaaaataaaaaaaaaatata

SEQ ID NO: 10482 - RNA, 64 nt, synthetic construct
  source 1..64: mol_type = other RNA
aaaaaaaaaaaaaaaaaaaaaaaaaaaaaaaaaaaaaaaaaaaaaaaaaataaaaataaatata

SEQ ID NO: 10483 - RNA, 64 nt, synthetic construct
  source 1..64: mol_type = other RNA
aaaaaaaaaaaaaaaaaaaaaaaaaaaaaaaataaataaaaaaaaaaaaaaaaaaaaaaatata

SEQ ID NO: 10484 - RNA, 64 nt, synthetic construct
  source 1..64: mol_type = other RNA
aaaaaaaaaaaaaaaaaaaaaaaaaaaaaaaataaaaaaaaaaaaaaaaaaaaaaataaatata

SEQ ID NO: 10485 - RNA, 64 nt, synthetic construct
  source 1..64: mol_type = other RNA
aaaaaaaaaaaaaaaaaaaaaaaaaaaataaataaaaaaaaaaaaaaaaaaaaaaaaaaatata

SEQ ID NO: 10486 - RNA, 64 nt, synthetic construct
  source 1..64: mol_type = other RNA
aaaaaaaaaaaaaaaaaaaaaaaaaaaaaaaaaaaaaaaaaaaaaataaataaaaaaaaatata

SEQ ID NO: 10487 - RNA, 64 nt, synthetic construct
  source 1..64: mol_type = other RNA
aaaaaaaaaaaaaaaaaaaaaaaaaaaaaaaaaaaaaaaaaaaaaaaataaaaaaataaatata

SEQ ID NO: 10488 - RNA, 64 nt, synthetic construct
  source 1..64: mol_type = other RNA
aaaaaaaaaaaaaaaaaaaaaaaaaaaaaaaaaaaaaaaaaataaataaaaaaaaaaaaatata

SEQ ID NO: 10489 - RNA, 64 nt, synthetic construct
  source 1..64: mol_type = other RNA
aaaaaaaaataaataaaaaaaaaaaaaaaaaaaaaaaaaaaaaaaaaaaaaaaaaaaaaatata

SEQ ID NO: 10490 - RNA, 64 nt, synthetic construct
  source 1..64: mol_type = other RNA
aaaaaaaaaaaaaaaaaaaaaaaaaaaaaaaaaaaaaaaaaaaaaaaataaataaaaaaatata

SEQ ID NO: 10491 - RNA, 64 nt, synthetic construct
  source 1..64: mol_type = other RNA
aaaaaaaaaaaaaaaaaaaaaaaaaaaaaaaaaaaaaaaaaaaaaataaaaaaaaataaatata

SEQ ID NO: 10492 - RNA, 64 nt, synthetic construct
  source 1..64: mol_type = other RNA
aaaaaaaaaaaaaaaaaaaaaaaaaaaaaaaaaaaaaaaaaaaaaaaaataaataaaaaatata

SEQ ID NO: 10493 - RNA, 64 nt, synthetic construct
  source 1..64: mol_type = other RNA
aaaaataaataaaaaaaaaaaaaaaaaaaaaaaaaaaaaaaaaaaaaaaaaaaaaaaaaatata

SEQ ID NO: 10494 - RNA, 64 nt, synthetic construct
  source 1..64: mol_type = other RNA
aaaaaaaaaaaaaaaaaaaaaataaataaaaaaaaaaaaaaaaaaaaaaaaaaaaaaaaatata

SEQ ID NO: 10495 - RNA, 64 nt, synthetic construct
  source 1..64: mol_type = other RNA
aaaaaaaaaaaaaaaaataaaaaaaaaaaaaaaaaaaaaaaaaaaaaaaaaataaataaatata

SEQ ID NO: 10496 - RNA, 64 nt, synthetic construct
  source 1..64: mol_type = other RNA
aaaaaaaaaaaaaaaaaaaaaaaaaaaaaaaataaataaaaaaaaaaaaaaaaaaataaatata

SEQ ID NO: 10497 - RNA, 64 nt, synthetic construct
  source 1..64: mol_type = other RNA
aaaaaaaaaaaaaaaaaaaaaaaaaaaataaataaaaaaaaaaaaaaaaaaaaaaataaatata

SEQ ID NO: 10498 - RNA, 64 nt, synthetic construct
  source 1..64: mol_type = other RNA
aaaaaaaaaaaaaaaaaaaaaaaaaaaataaataaataaaaaaaaaaaaaaaaaaaaaaatata

SEQ ID NO: 10499 - RNA, 64 nt, synthetic construct
  source 1..64: mol_type = other RNA
aaaaaaaaaaaaaaaaaaaaaaaataaataaaaaaaaaaaaaaaaaaaaaaaaaaataaatata

SEQ ID NO: 10500 - RNA, 64 nt, synthetic construct
  source 1..64: mol_type = other RNA
aaaaaaaaaaataaaaaaaaaaaaaaaaaaaaaaaaaaaaaaaaaaaaaaaataaataaatata

SEQ ID NO: 10501 - RNA, 64 nt, synthetic construct
  source 1..64: mol_type = other RNA
aaaaaaaaaataaaaaaaaaaaaaaaaaaaaaaaaaaaaaaaaaaaaaaaaataaataaatata

SEQ ID NO: 10502 - RNA, 64 nt, synthetic construct
  source 1..64: mol_type = other RNA
aaaaaaataaataaaaaaaaaaaaaaaaaaaaaaaaaaaaaaaaaaaaaaaaaaaataaatata

SEQ ID NO: 10503 - RNA, 64 nt, synthetic construct
  source 1..64: mol_type = other RNA
aaaaaaaaaaaaaaaaaaaaaaaaaaaaaaaaaaaaaaaaaataaataaataaaaaaaaatata

SEQ ID NO: 10504 - RNA, 64 nt, synthetic construct
  source 1..64: mol_type = other RNA
aaaaaaaaaaaaaaaaaaaaaaaaaaaaaaaaaaaaaaaaaaaaaataaataaaaataaatata

SEQ ID NO: 10505 - RNA, 64 nt, synthetic construct
  source 1..64: mol_type = other RNA
aaaaaaaaaaaaaaaaaaaaaaaaaaaaaaaaaaaaaaaaaaaaaataaaaataaataaatata

SEQ ID NO: 10506 - RNA, 64 nt, synthetic construct
  source 1..64: mol_type = other RNA
aaaaaaaaaaaaaaaaaaaaaataaataaataaaaaaaaaaaaaaaaaaaaaaaaaaaaatata

SEQ ID NO: 10507 - RNA, 64 nt, synthetic construct
  source 1..64: mol_type = other RNA
aaaaaaaaaaaaaaaaaataaataaataaaaaaaaaaaaaaaaaaaaaaaaaaaaaaaaatata

SEQ ID NO: 10508 - RNA, 65 nt, synthetic construct
  source 1..65: mol_type = other RNA
aaaaaaaaaaaaaaaaaaaaaaaaaaaaaaaaaaaaaaaaaaaaaaaaaaaaaaaaaaaaaataa

SEQ ID NO: 10509 - RNA, 65 nt, synthetic construct
  source 1..65: mol_type = other RNA
aaaaaaaaaaaaaaaaaaaaaaaaaaaaaaaaaaaaaaaaaaaaaaaaaaaaaaaaaataaataa

SEQ ID NO: 10510 - RNA, 65 nt, synthetic construct
  source 1..65: mol_type = other RNA
aaaaaaaaaaaaaaaaaaaaaaaaaaaaaaaaaaaaaaaaaaaaaaataaataaataaatatata

SEQ ID NO: 10511 - RNA, 65 nt, synthetic construct
  source 1..65: mol_type = other RNA
aaaaaaaaaaaaaaaaaaaaaaaaaaaaaaaaaaaaaaaaaaataaataaataaataaatatata

SEQ ID NO: 10512 - RNA, 65 nt, synthetic construct
  source 1..65: mol_type = other RNA
aaaaaaaaaaaaaaaaaaaaaaaaaaaaaaaaaaaaaaaaaaaaaaaaaaaaaaaaaaaaataaa

SEQ ID NO: 10513 - RNA, 65 nt, synthetic construct
  source 1..65: mol_type = other RNA
aaaaaaaaaaaaaaaaaaaaaaaaaaaaaaaaaaaaaaaaaaaaaaaaaaaaaaaaaaaaaatat

SEQ ID NO: 10514 - RNA, 65 nt, synthetic construct
  source 1..65: mol_type = other RNA
aaaaaaaaaaaaaaaaaaaaaaaaaaaaaaaaaaaaaaaaaaaaaaataaataaataaataaata

SEQ ID NO: 10515 - RNA, 65 nt, synthetic construct
  source 1..65: mol_type = other RNA
aaaaaaaaaaaaaaaaaaaaaaaaaaaaaaaaaaaaaaaaaaataaataaataaataaataaata

SEQ ID NO: 10516 - RNA, 65 nt, synthetic construct
  source 1..65: mol_type = other RNA
aaaaaaaaaaaaaaaaaaaaaaaaaaaaaaaaaaaaaaaaatataaataaataaataaatatata

SEQ ID NO: 10517 - RNA, 65 nt, synthetic construct
  source 1..65: mol_type = other RNA
aaataaataaatataaataaataaataaataaataaataaataaataaataaaaaaaaaaatata

SEQ ID NO: 10518 - RNA, 65 nt, synthetic construct
  source 1..65: mol_type = other RNA
aaataaataaataaatataaataaataaataaataaataaataaataaataaaaaaaaaaatata

SEQ ID NO: 10519 - RNA, 65 nt, synthetic construct
  source 1..65: mol_type = other RNA
aaataaatataaataaataaataaataaataaataaataaataaataaataaaaaaaaaaatata

SEQ ID NO: 10520 - RNA, 65 nt, synthetic construct
  source 1..65: mol_type = other RNA
aaataaaaaaaaaaaaaaaaaaaaaaaaaaaaaaaaaaaaaaaaaaataaataaataaatatata

SEQ ID NO: 10521 - RNA, 65 nt, synthetic construct
  source 1..65: mol_type = other RNA
aaataaataaatataaataaataaataaataaataaataaataaataaataaaaaaataaatata

SEQ ID NO: 10522 - RNA, 65 nt, synthetic construct
  source 1..65: mol_type = other RNA
aaataaataaataaatataaataaataaataaataaataaataaataaataaaaaaataaatata

SEQ ID NO: 10523 - RNA, 65 nt, synthetic construct
  source 1..65: mol_type = other RNA
aaataaaaaaaaaaaaaaaaaaaaaaaaaaaaaaaaaaaaaaataaataaataaataaatatata

SEQ ID NO: 10524 - RNA, 65 nt, synthetic construct
  source 1..65: mol_type = other RNA
aaaaaaaaaaaaaaaaaaaaaaaaaaaaaaaaaaaaaaaaaaaaaaaaaaaaaaaaaaaaataat

SEQ ID NO: 10525 - RNA, 65 nt, synthetic construct
  source 1..65: mol_type = other RNA
aaaaaaaaaaaaaaaaaaaaaaaaaaaaaaaaaaaataaatataaataaataaataaataaatat

SEQ ID NO: 10526 - RNA, 65 nt, synthetic construct
  source 1..65: mol_type = other RNA
aaaaaaaaaaaaaaaaaaaaaaaaaaaaaaaaaaaataaataaatataaataaataaataaatat

SEQ ID NO: 10527 - RNA, 65 nt, synthetic construct
  source 1..65: mol_type = other RNA
aaaaaaaaaaaaaaaaaaaaaaaaaaaaaaaaaaaaaaaaaaaaaaaaaaaaaaaaaaaaaaaaa

SEQ ID NO: 10528 - RNA, 65 nt, synthetic construct
  source 1..65: mol_type = other RNA
aaaaaaaaaaaaaaaaaaaaaaaaaaaaaaaaaaaaaaaaatataaataaataaataaataaata

SEQ ID NO: 10529 - RNA, 65 nt, synthetic construct
  source 1..65: mol_type = other RNA
aaaaaaaaaaaaaaaaaaaaaaaaaaaaaaaaaaaaaaaaaataaataaatataaatataaataa

SEQ ID NO: 10530 - RNA, 65 nt, synthetic construct
  source 1..65: mol_type = other RNA
aaaaaaaaaaaaaaaaaaaaaaaaaaaaaaaaaaaaaataaataaataaatataaatataaataa

SEQ ID NO: 10531 - RNA, 65 nt, synthetic construct
  source 1..65: mol_type = other RNA
aaataaaaaaaaaaaaaaaaaaaaaaaaaaaaaaaaaaaaatataaataaataaataaatatata

SEQ ID NO: 10532 - RNA, 65 nt, synthetic construct
  source 1..65: mol_type = other RNA
aaaaaaaaaaaaaaaaaaaaaaaaaaaaaaaaaaaaaaaaaaaaaaatatataaataaatatata

SEQ ID NO: 10533 - RNA, 65 nt, synthetic construct
  source 1..65: mol_type = other RNA
aaaaaaaaaaaaaaaaaaaaaaaaaaaaaaaaaaaaaaaaaataaataaatataaatataaatat

SEQ ID NO: 10534 - RNA, 65 nt, synthetic construct
  source 1..65: mol_type = other RNA
aaaaaaaaaaaaaaaaaaaaaaaaaaaaaaaaaaaaaataaataaataaatataaatataaatat

SEQ ID NO: 10535 - RNA, 65 nt, synthetic construct
  source 1..65: mol_type = other RNA
aaaaaaaaaaaaaaaaaaaaaaaaaaaaaaaaaatataaatataaataaataaataaataaatat

SEQ ID NO: 10536 - RNA, 65 nt, synthetic construct
  source 1..65: mol_type = other RNA
aaaaaaaaaaaaaaaaaaaaaaaaaaataaaaaaaaaaaaaaaaaaaaaaataaatataaatata

SEQ ID NO: 10537 - RNA, 65 nt, synthetic construct
  source 1..65: mol_type = other RNA
aaaaaaaaaaaaaaaaaaaaaaaaataaataaaaaaaaaaaaaaaaaaaaaaaaatataaatata

SEQ ID NO: 10538 - RNA, 65 nt, synthetic construct
  source 1..65: mol_type = other RNA
aaaaaaaaaaaaaaaataaataaatataaataaaaaaaaaaaaaaaaaaaaaaaaaaaaaatata

SEQ ID NO: 10539 - RNA, 65 nt, synthetic construct
  source 1..65: mol_type = other RNA
aaaaaaaaaaaaaaaaaaaaaaaaaaataaaaaaaaaaaaaaaaaaataaataaatataaatata

SEQ ID NO: 10540 - RNA, 65 nt, synthetic construct
  source 1..65: mol_type = other RNA
aaaaaaaaaaaaaaaataaataaatataaataaataaaaaaaaaaaaaaaaaaaaaaaaaatata

SEQ ID NO: 10541 - RNA, 65 nt, synthetic construct
  source 1..65: mol_type = other RNA
aaaaaaaaaaaaaaaataaataaatataaataaataaataaaaaaaaaaaaaaaaaaaaaatata

SEQ ID NO: 10542 - RNA, 65 nt, synthetic construct
  source 1..65: mol_type = other RNA
aaaaaaaaaaaaaaaaaaaaaaataaataaataaataaataaatataaaaaaaaaaaaaaatata

SEQ ID NO: 10543 - RNA, 65 nt, synthetic construct
  source 1..65: mol_type = other RNA
aaaaaaaaaaaaaaaataaataaatataaataaataaataaataaaaaaaaaaaaaaaaaatata

SEQ ID NO: 10544 - RNA, 65 nt, synthetic construct
  source 1..65: mol_type = other RNA
aaaaaaaaaaaaaaaaaaaaaaaaaaaaaaaaaaaaaaaaaaaaaaaaaaaaaaaaaaaatatac

SEQ ID NO: 10545 - RNA, 65 nt, synthetic construct
  source 1..65: mol_type = other RNA
aaaaaaaaaaaaaaaaaaaaaataaaaaaaaaaaaaaaaaaaaaaaaaaaaaaaataaatatata

SEQ ID NO: 10546 - RNA, 65 nt, synthetic construct
  source 1..65: mol_type = other RNA
aaaaaaaaaaaaaaaaaaaaaaaaaaaaaaaaaaaaaaaaaaataaataaaaaaaaaaatatata

SEQ ID NO: 10547 - RNA, 65 nt, synthetic construct
  source 1..65: mol_type = other RNA
aaaaaaaaaaaaaaaaaaaaaaaaaaaaaaaaaaaaaaaaaaaaaaataaaaaaataaatatata

SEQ ID NO: 10548 - RNA, 65 nt, synthetic construct
  source 1..65: mol_type = other RNA
aaaaaaaaaaaaaaaaaaaaaaaaaaaaataaaaaaaaaaaaaaaaaaaaaaaaaaaaaaaataa

SEQ ID NO: 10549 - RNA, 65 nt, synthetic construct
  source 1..65: mol_type = other RNA
aaaaaaaaaaaaaaaaaaaaaaaaaaaaaaaaaataaaaaaaaaaaaaaaaaaaaaaaaaaataa

SEQ ID NO: 10550 - RNA, 65 nt, synthetic construct
  source 1..65: mol_type = other RNA
aaaaaaaaaaaaaaaaaaaaaaaaaaaaaaaaaaaaaaataaaaaaaaaaaaaaaaaaaaaataa

SEQ ID NO: 10551 - RNA, 65 nt, synthetic construct
  source 1..65: mol_type = other RNA
aaaaaaaaaaaaaaaaaaaaaaaaaaaaaaaaaaaaaaaataaaaaaaaaaaaaaaaaaaaataa

SEQ ID NO: 10552 - RNA, 65 nt, synthetic construct
  source 1..65: mol_type = other RNA
aaaaaaaaaaaaaaaaaaataaaaaaaaaaaaaaaaaaaaaaaaaaaaaaaaaaaaaaaaaataa

SEQ ID NO: 10553 - RNA, 65 nt, synthetic construct
  source 1..65: mol_type = other RNA
aaaaaaaaaaaaaaaaaaaaaaaaaaaaaaaaaaaataaaaaaaaaaaaaaaaaaaaaaaaataa

SEQ ID NO: 10554 - RNA, 65 nt, synthetic construct
  source 1..65: mol_type = other RNA
aaaataaaaaaaaaaaaaaaaaaaaaaaaaaaaaaaaaaaaaaaaaaaaaaaaaaaaaaaaataa

SEQ ID NO: 10555 - RNA, 65 nt, synthetic construct
  source 1..65: mol_type = other RNA
aaaaaaaaaaaaaaaaaaaaaaaaaaaaaaaaaaaaaaaaaaaaaaaaaaaataaaaaaaaataa

SEQ ID NO: 10556 - RNA, 65 nt, synthetic construct
  source 1..65: mol_type = other RNA
aaaaaaaaaaaataaaaaaaaaaaaaaaaaaaaaaaaaaaaaaaaaaaaaaaaaaaaaaaaataa

SEQ ID NO: 10557 - RNA, 65 nt, synthetic construct
  source 1..65: mol_type = other RNA
aaaaaaaaaaaaaaaaaaaaaaaaaaaaaaaaaaaaaaaaaaaaaaaaaaaaaaaataaaaataa

SEQ ID NO: 10558 - RNA, 65 nt, synthetic construct
  source 1..65: mol_type = other RNA
aaaaaaaaaaaaaataaaaaaaaaaaaaaaaaaaaaaaaaaaaaaaaaaaaaaaaaaaaaaataa

SEQ ID NO: 10559 - RNA, 65 nt, synthetic construct
  source 1..65: mol_type = other RNA
aaaaaaaaaaaaataaaaaaaaaaaaaaaaaaaaaaaaaaaaaaaaaaaaaaaaaaaaaaaataa

SEQ ID NO: 10560 - RNA, 65 nt, synthetic construct
  source 1..65: mol_type = other RNA
aaaaaaaaaaaaaaaaaaaaaataaataaaaaaaaaaaaaaaaaaaaaaaaaaaataaatatata

SEQ ID NO: 10561 - RNA, 65 nt, synthetic construct
  source 1..65: mol_type = other RNA
aaaaaaaaaaaaaaaaaaaaaaaaaaaaaaaaaaaaaaaaaaataaataaataaaaaaatatata

SEQ ID NO: 10562 - RNA, 65 nt, synthetic construct
  source 1..65: mol_type = other RNA
aaaaaaaaaaaaaaaaaaaaaaaaaaaaaaaaaaaaaaaaaaataaataaaaaaataaatatata

SEQ ID NO: 10563 - RNA, 65 nt, synthetic construct
  source 1..65: mol_type = other RNA
aaaaaaaaaaaaaaaaaaaaaaaaaaaaataaataaaaaaaaaaaaaaaaaaaaaaaaaaaataa

SEQ ID NO: 10564 - RNA, 65 nt, synthetic construct
  source 1..65: mol_type = other RNA
aaaaaaaaaaaaaaaaaaaaaaaaaaaaataaaaaaaaaaaaaaaaaaaaaaaaaaaataaataa

SEQ ID NO: 10565 - RNA, 65 nt, synthetic construct
  source 1..65: mol_type = other RNA
aaaaaaaaaaaaaaaaaaaaaaaaataaataaaaaaaaaaaaaaaaaaaaaaaaaaaaaaaataa

SEQ ID NO: 10566 - RNA, 65 nt, synthetic construct
  source 1..65: mol_type = other RNA
aaaaaaaaaaaaaaaaaaaaaaaaaaaaaaaaaaataaataaaaaaaaaaaaaaaaaaaaaataa

SEQ ID NO: 10567 - RNA, 65 nt, synthetic construct
  source 1..65: mol_type = other RNA
aaaaaaaaaaaaaaataaataaaaaaaaaaaaaaaaaaaaaaaaaaaaaaaaaaaaaaaaaataa

SEQ ID NO: 10568 - RNA, 65 nt, synthetic construct
  source 1..65: mol_type = other RNA
aaaaaaaaaaaaaaaaaaaaaaaaaaaaaaaaaaaaaaaataaataaaaaaaaaaaaaaaaataa

SEQ ID NO: 10569 - RNA, 65 nt, synthetic construct
  source 1..65: mol_type = other RNA
aaaaaaaaaaaaaaaaaaaaaaaaaaaaaaaaataaaaaaaaaaaaataaataaataaatatata

SEQ ID NO: 10570 - RNA, 65 nt, synthetic construct
  source 1..65: mol_type = other RNA
aaaaaaaaaaaaaataaaaaaaaaaaaaaaaaaaaaaaaaaaaaaaataaataaataaatatata

SEQ ID NO: 10571 - RNA, 65 nt, synthetic construct
  source 1..65: mol_type = other RNA
aaaaaaaaaaaaaaaaaaaaaaataaaaaaaaaaaaaaaaaaaaaaataaataaataaatatata

SEQ ID NO: 10572 - RNA, 65 nt, synthetic construct
  source 1..65: mol_type = other RNA
aaaaaaaaaaaaaaaaaaaataaaaaaaaaaaaaaaaaaaaaaaaaataaataaataaatatata

SEQ ID NO: 10573 - RNA, 65 nt, synthetic construct
  source 1..65: mol_type = other RNA
aaaaaaaaaaaaaaaaaaaaaaaaaaaaaaaaaaaaaaaaataaaaataaataaataaatatata

SEQ ID NO: 10574 - RNA, 65 nt, synthetic construct
  source 1..65: mol_type = other RNA
aaaaaaaaaaaaaaaaaataaaaaaaaaaaaaaaaaaaaaaaaaaaataaataaataaatatata

SEQ ID NO: 10575 - RNA, 65 nt, synthetic construct
  source 1..65: mol_type = other RNA
aaaaaaaaaaaataaaaaaaaaaaaaaaaaaaaaaaaaaaaaaaaaataaataaataaatatata

SEQ ID NO: 10576 - RNA, 65 nt, synthetic construct
  source 1..65: mol_type = other RNA
aaaaaaaaaaaaaaaataaaaaaaaaaaaaaaaaaaaaaaaaaaaaataaataaataaatatata

SEQ ID NO: 10577 - RNA, 65 nt, synthetic construct
  source 1..65: mol_type = other RNA
aaaaaaaaaaaaaaaaaaaaaaaaaaataaaaaaaaaaaaaaaaaaataaataaataaatatata

SEQ ID NO: 10578 - RNA, 65 nt, synthetic construct
  source 1..65: mol_type = other RNA
aaaaaaaaaaaaaaaaaaaaaataaaaaaaaaaaaaaaaaaaaaaaataaataaataaatatata

SEQ ID NO: 10579 - RNA, 65 nt, synthetic construct
  source 1..65: mol_type = other RNA
aaaaaaaaaaaaaaaaaaaaaaaaaataaaaaaaaaaaaaaaaaaaataaataaataaatatata

SEQ ID NO: 10580 - RNA, 65 nt, synthetic construct
  source 1..65: mol_type = other RNA
aaaaaaaaaaaaaaaaaaaaaaaaaaaataaaaaaaaaaaaaaaaaataaataaataaatatata

SEQ ID NO: 10581 - RNA, 65 nt, synthetic construct
  source 1..65: mol_type = other RNA
aaaaaaaaaaaaaaaaaaaaaaaaaaaaaaataaaaaaaaaaaaaaataaataaataaatatata

SEQ ID NO: 10582 - RNA, 65 nt, synthetic construct
  source 1..65: mol_type = other RNA
aaaataaaaaaaaaaaaaaaaaaaaaaaaaaaaaaaaaaaaaaaaaataaataaataaatatata

SEQ ID NO: 10583 - RNA, 65 nt, synthetic construct
  source 1..65: mol_type = other RNA
aaaaaaaaaaaaaaaaaaaaaaaaataaaaaaaaaaaaaaaaaaaaataaataaataaatatata

SEQ ID NO: 10584 - RNA, 65 nt, synthetic construct
  source 1..65: mol_type = other RNA
aaaaaaaaaaaaaaaaaaaaaaaaaaaaataaataaaaaaaaaaaaaaaaaaaaaaaataaataa

SEQ ID NO: 10585 - RNA, 65 nt, synthetic construct
  source 1..65: mol_type = other RNA
aaaaaaaaaaaataaataaaaaaaaaaaaaaaaaaaaaaaaaaaaaataaataaataaatatata

SEQ ID NO: 10586 - RNA, 65 nt, synthetic construct
  source 1..65: mol_type = other RNA
aaaaaaaaaaaaaataaaaaaaaaaaaaaaaaaaaaaaaaaaataaataaataaataaatatata

SEQ ID NO: 10587 - RNA, 65 nt, synthetic construct
  source 1..65: mol_type = other RNA
aaaaaaaaaaaaaaaaaaaaaaaaaaaaataaaaaaaaaaaaataaataaataaataaatatata

SEQ ID NO: 10588 - RNA, 65 nt, synthetic construct
  source 1..65: mol_type = other RNA
aaaaaaaaaaaaaaaaaaaaaaaaaataaaaaaaaaaaaaaaataaataaataaataaatatata

SEQ ID NO: 10589 - RNA, 65 nt, synthetic construct
  source 1..65: mol_type = other RNA
aaaaaaaaaaaaaaaaaaaataaaaaaaaaaaaaaaaaaaaaataaataaataaataaatatata

SEQ ID NO: 10590 - RNA, 65 nt, synthetic construct
  source 1..65: mol_type = other RNA
aaaaaaaaaaaaaaaaaaaaaaaaaaataaaaaaaaaaaaaaataaataaataaataaatatata

SEQ ID NO: 10591 - RNA, 65 nt, synthetic construct
  source 1..65: mol_type = other RNA
aaaaaaaaaaaaaaaaaataaaaaaaaaaaaaaaaaaaaaaaataaataaataaataaatatata

SEQ ID NO: 10592 - RNA, 65 nt, synthetic construct
  source 1..65: mol_type = other RNA
aaaaaaaaaaaaaaaaaaaaaataaaaaaaaaaaaaaaaaaaataaataaataaataaatatata

SEQ ID NO: 10593 - RNA, 65 nt, synthetic construct
  source 1..65: mol_type = other RNA
aaaaaaaaaaaaaaaaaaaaaaaaaaaataaaaaaaaaaaaaataaataaataaataaatatata

SEQ ID NO: 10594 - RNA, 65 nt, synthetic construct
  source 1..65: mol_type = other RNA
aaaaaaaaaaaaaaaaaaaaaaataaataaaaaaaaaaaaaaaaaaataaataaataaatatata

SEQ ID NO: 10595 - RNA, 65 nt, synthetic construct
  source 1..65: mol_type = other RNA
aaaaaaaaaaaaaaaaaaaaaaaaaaaaaaaaataaaaaaaaataaataaataaataaatatata

SEQ ID NO: 10596 - RNA, 65 nt, synthetic construct
  source 1..65: mol_type = other RNA
aaaaaaaaaaaaaaaaaaaaaaataaaaaaaaaaaaaaaaaaataaataaataaataaatatata

SEQ ID NO: 10597 - RNA, 65 nt, synthetic construct
  source 1..65: mol_type = other RNA
aaaaaaaaaaaaaaaataaaaaaaaaaaaaaaaaaaaaaaaaataaataaataaataaatatata

SEQ ID NO: 10598 - RNA, 65 nt, synthetic construct
  source 1..65: mol_type = other RNA
aaaaaaaaaaaataaaaaaaaaaaaaaaaaaaaaaaaaaaaaataaataaataaataaatatata

SEQ ID NO: 10599 - RNA, 65 nt, synthetic construct
  source 1..65: mol_type = other RNA
aaaaaaaaaaaaaaaaaaaaaaaaaaaaaaaaaaaataaaaaataaataaataaataaatatata

SEQ ID NO: 10600 - RNA, 65 nt, synthetic construct
  source 1..65: mol_type = other RNA
aaaaaaaaaaaaaaaaaaaaaaaaaaaaaaaaaaaaaaaataaaaaaaaaaaaaaaaaaaataaa

SEQ ID NO: 10601 - RNA, 65 nt, synthetic construct
  source 1..65: mol_type = other RNA
aaaaaaaaaaaaaaaaaaaaaaaaaaaaaaaaaataaaaaaaaaaaaaaaaaaaaaaaaaataaa

SEQ ID NO: 10602 - RNA, 65 nt, synthetic construct
  source 1..65: mol_type = other RNA
aaaaaaaaaaaaaaaaaaaaaaaaaaaaaaaaaaaaaaataaaaaaaaaaaaaaaaaaaaataaa

SEQ ID NO: 10603 - RNA, 65 nt, synthetic construct
  source 1..65: mol_type = other RNA
aaaaaaaaaaaaaaaaaaataaaaaaaaaaaaaaaaaaaaaaaaaaaaaaaaaaaaaaaaataaa

SEQ ID NO: 10604 - RNA, 65 nt, synthetic construct
  source 1..65: mol_type = other RNA
aaaaaaaaaaaaaaaaaaaaaaaaaataaaaaaaaaaaaaaaaaaaaaaaaaaaaaaaaaataaa

SEQ ID NO: 10605 - RNA, 65 nt, synthetic construct
  source 1..65: mol_type = other RNA
aaaaaaaaaaaaaaataaaaaaaaaaaaaaaaaaaaaaaaaaaaaaaaaaaaaaaaaaaaataaa

SEQ ID NO: 10606 - RNA, 65 nt, synthetic construct
  source 1..65: mol_type = other RNA
aaaaaaaaaaaaaaaaaaaaaaaaaaaaaaaaaaaataaaaaaaaaaaaaaaaaaaaaaaataaa

SEQ ID NO: 10607 - RNA, 65 nt, synthetic construct
  source 1..65: mol_type = other RNA
aaaaaaaaaaaataaaaaaaaaaaaaaaaaaaaaaaaaaaaaaaaaaaaaaaaaaaaaaaataaa

SEQ ID NO: 10608 - RNA, 65 nt, synthetic construct
  source 1..65: mol_type = other RNA
aaaaaaaaaaaaaaaaaaaaaaaaaaaaaataaaaaaaaaaaaaaaaaaaaaaaaaaaaaataaa

SEQ ID NO: 10609 - RNA, 65 nt, synthetic construct
  source 1..65: mol_type = other RNA
aaaaaaaaaaaaaaaaaataaaaaaaaaaaaaaaaaaaaaaaaaaaaaaaaaaaaaaaaaataaa

SEQ ID NO: 10610 - RNA, 65 nt, synthetic construct
  source 1..65: mol_type = other RNA
aaaaaaaaaaaaaaaaaaaaaaaaaaaaaaaaaaaaaaaaaaaataaaaaaaaaaaaaaaataaa

SEQ ID NO: 10611 - RNA, 65 nt, synthetic construct
  source 1..65: mol_type = other RNA
aaaaaaaaaaaaaaaaaaaaaaaaaaaaaaaaaaataaaaaaaaaaaaaaaaaaaaaaaaataaa

SEQ ID NO: 10612 - RNA, 66 nt, synthetic construct
  source 1..66: mol_type = other RNA
aaataaataaataaataaataaataaaaaaaaaaaaaaaaaaaaaaaaaaaaaaaaaaaaaatata

SEQ ID NO: 10613 - RNA, 66 nt, synthetic construct
  source 1..66: mol_type = other RNA
aaaaaaaaaaaaaaaaaaaaaaaaaaaaaaaaaaaaaaaaaaaaaaaaaaaaaaaaaaaaaaaata

SEQ ID NO: 10614 - RNA, 66 nt, synthetic construct
  source 1..66: mol_type = other RNA
aaaaaaaaaaaaaaaaaaaaaaaaaaaaaaaaaaaaaaaataaataaataaataaataaatataaa

SEQ ID NO: 10615 - RNA, 66 nt, synthetic construct
  source 1..66: mol_type = other RNA
aaaaaaaaaaaaaaaaaaaaaaaaaaaaaaaaaaaataaataaataaataaataaataaatataaa

SEQ ID NO: 10616 - RNA, 66 nt, synthetic construct
  source 1..66: mol_type = other RNA
aaaaaaaaaaaaaaaaaaaaaaaaaaaaaaaaaaaataaataaataaataaataaatataaataaa

SEQ ID NO: 10617 - RNA, 66 nt, synthetic construct
  source 1..66: mol_type = other RNA
aaataaataaataaataaataaataaaaaaaaaaaaaaaaaaaaaaaaaaaaaaaaaaaatatata

SEQ ID NO: 10618 - RNA, 66 nt, synthetic construct
  source 1..66: mol_type = other RNA
aaaaaaaaaaaaaaaaaaaaataaaaaaaaaaaaaaaaaaaaaaaaaaaaaaaaaaaaaaaatata

SEQ ID NO: 10619 - RNA, 66 nt, synthetic construct
  source 1..66: mol_type = other RNA
aaaaaaaaaaaaaaaaaataaaaaaaaaaaaaaaaaaaaaaaaaaaaaaaaaaaaaaaaaaatata

SEQ ID NO: 10620 - RNA, 66 nt, synthetic construct
  source 1..66: mol_type = other RNA
aaaaaaaaaaaaaaaaaaaaaaaaaaaaaaaaaaaaaaaaaaaaaaaaaaaaataaaaaaaatata

SEQ ID NO: 10621 - RNA, 66 nt, synthetic construct
  source 1..66: mol_type = other RNA
aaaaaaaaaaaaaaaaaaaaaaaaaaaaaaaaaaaaaaaaaaaaataaaaaaaaaaaaaaaatata

SEQ ID NO: 10622 - RNA, 66 nt, synthetic construct
  source 1..66: mol_type = other RNA
aaaaaaaaaaaaaaaaaaaaataaaaaaaaaaaaaaaaaaaaaaaaaaaaaaaaaaaataaatata

SEQ ID NO: 10623 - RNA, 66 nt, synthetic construct
  source 1..66: mol_type = other RNA
aaaaaaaaaaaaaaaaaaaaataaataaaaaaaaaaaaaaaaaaaaaaaaaaaaaaaaaaaatata

SEQ ID NO: 10624 - RNA, 66 nt, synthetic construct
  source 1..66: mol_type = other RNA
aaaaaaaaaaaaaataaataaaaaaaaaaaaaaaaaaaaaaaaaaaaaaaaaaaaaaaaaaatata

SEQ ID NO: 10625 - RNA, 66 nt, synthetic construct
  source 1..66: mol_type = other RNA
aaaaaaaaaaaaaaaaaaaaaaaaaaaaaaaaaaaaaaaaaaaaataaataaaaaaaaaaaatata

SEQ ID NO: 10626 - RNA, 66 nt, synthetic construct
  source 1..66: mol_type = other RNA
aaaaaaaaaaaaaaaaaaaaaaaaaaaaaaaaaaaaaaaaaaataaataaaaaaaaaaaaaatata

SEQ ID NO: 10627 - RNA, 66 nt, synthetic construct
  source 1..66: mol_type = other RNA
aaaaaaaaaaaaaaaaaaaaaaaaaaaaaaaaaaaaaaaaaaaaaaaaaaaaataaataaaatata

SEQ ID NO: 10628 - RNA, 66 nt, synthetic construct
  source 1..66: mol_type = other RNA
aaaaaaaaaaaaaaaaaaaaaaaaaaaaaaaaaaaaaaaaaaaaataaaaaaaaaaaataaatata

SEQ ID NO: 10629 - RNA, 66 nt, synthetic construct
  source 1..66: mol_type = other RNA
aaaaaaaaaaaaaaaaaaaaaaaaaaaaaaaaaaaaaaaaataaataaaaaaaaaaaaaaaatata

SEQ ID NO: 10630 - RNA, 66 nt, synthetic construct
  source 1..66: mol_type = other RNA
aaaaaaaaaaaaaaaaaaaaaaaaaaaaaaaaaaaaaaaaaaaaaaaaaaaaaaaaaaaaaaaaaa

SEQ ID NO: 10631 - RNA, 66 nt, synthetic construct
  source 1..66: mol_type = other RNA
aaaaaaaaaaaaaaaaaaaaaaaaaaaaaaataaataaataaaaaaaaaaaaaaaaaaaaaatata

SEQ ID NO: 10632 - RNA, 66 nt, synthetic construct
  source 1..66: mol_type = other RNA
aaaaaaaaaaaaaaaaaaaaataaataaaaaaaaaaaaaaaaaaaaaaaaaaaaaaaataaatata

SEQ ID NO: 10633 - RNA, 66 nt, synthetic construct
  source 1..66: mol_type = other RNA
aaaaaaaaaaaaaaaaaaaaaaaaaaaaaaaaaaaaaaaaataaataaataaaaaaaaaaaatata

SEQ ID NO: 10634 - RNA, 66 nt, synthetic construct
  source 1..66: mol_type = other RNA
aaaaaaaaaaaaaaaaaaaaaaaaaaaaaaaaaaaaaaaaaaaaataaataaaaaaaataaatata

SEQ ID NO: 10635 - RNA, 66 nt, synthetic construct
  source 1..66: mol_type = other RNA
aaaaaaaaaaaaaaaaaaaaaaaaaaaaaaaaaaaaaaataaataaataaaaaaaaaaaaaatata

SEQ ID NO: 10636 - RNA, 66 nt, synthetic construct
  source 1..66: mol_type = other RNA
aaaaaaaaaaaaaaaaaaaaaaaaaaaaaaaaaaaaaaaaaaataaataaaaaaaaaataaatata

SEQ ID NO: 10637 - RNA, 66 nt, synthetic construct
  source 1..66: mol_type = other RNA
aaaaaaaaaaaaaaaaaaaaaaaaaaaaaaaaaaaaaaaaaaataaataaataaaaaaaaaatata

SEQ ID NO: 10638 - RNA, 66 nt, synthetic construct
  source 1..66: mol_type = other RNA
aaaaaaaaaaaaaaaaaaaaaaaaaaaaaaaaaaaaaaaaataaataaaaaaaaaaaataaatata

SEQ ID NO: 10639 - RNA, 66 nt, synthetic construct
  source 1..66: mol_type = other RNA
aaaaaaaaaaaaaataaataaataaaaaaaaaaaaaaaaaaaaaaaaaaaaaaaaaaaaaaatata

SEQ ID NO: 10640 - RNA, 66 nt, synthetic construct
  source 1..66: mol_type = other RNA
aaaaaaaaaaaaataaataaataaataaaaaaaaaaaaaaaaaaaaaaaaaaaaaaaaaaaatata

SEQ ID NO: 10641 - RNA, 66 nt, synthetic construct
  source 1..66: mol_type = other RNA
aaaaaaaaaaaaaaaaaaaaaaaaaaaaaaaaaaaaaaaaataaataaataaaaaaaataaatata

SEQ ID NO: 10642 - RNA, 66 nt, synthetic construct
  source 1..66: mol_type = other RNA
aaaaaaaaaaaaaaaaaaaaaaaaaaaaaaaaaaaaaaataaataaataaaaaaaaaataaatata

SEQ ID NO: 10643 - RNA, 66 nt, synthetic construct
  source 1..66: mol_type = other RNA
aaaaaaaaaataaataaataaataaataaataaataaataaataaataaataaataaataaataat

SEQ ID NO: 10644 - RNA, 66 nt, synthetic construct
  source 1..66: mol_type = other RNA
aaaaaataaataaataaataaataaataaataaataaataaataaataaataaataaataaataat

SEQ ID NO: 10645 - RNA, 66 nt, synthetic construct
  source 1..66: mol_type = other RNA
aaataaataaataaatataaatataaaaaaaaaaaaaaaaaaaaaaaaaaaaaaaaaaaaaatata

SEQ ID NO: 10646 - RNA, 66 nt, synthetic construct
  source 1..66: mol_type = other RNA
aaataaataaataaatataaatataaataaaaaaaaaaaaaaaaaaaaaaaaaaaaaaaaaatata

SEQ ID NO: 10647 - RNA, 66 nt, synthetic construct
  source 1..66: mol_type = other RNA
aaataaataaataaatataaatataaaaaaaaaaaaaaaaaaaaaaaaaaaaaaaaaataaatata

SEQ ID NO: 10648 - RNA, 66 nt, synthetic construct
  source 1..66: mol_type = other RNA
aaataaataaataaataaataaataaaaaaaaaaaaaaaaaaaaaaaaaaaaaaaaaaaaaaaata

SEQ ID NO: 10649 - RNA, 66 nt, synthetic construct
  source 1..66: mol_type = other RNA
aaataaataaataaatataaatataaataaaaaaaaaaaaaaaaaaaaaaaaaaaaaataaatata

SEQ ID NO: 10650 - RNA, 66 nt, synthetic construct
  source 1..66: mol_type = other RNA
aaataaataaataaatataaatataaaaaaaaaaaaaaaaaaaaaaaaaaaaaataaataaatata

SEQ ID NO: 10651 - RNA, 66 nt, synthetic construct
  source 1..66: mol_type = other RNA
aaataaataaataaatataaatataaataaaaaaaaaaaaaaaaaaaaaaaaaataaataaatata

SEQ ID NO: 10652 - RNA, 66 nt, synthetic construct
  source 1..66: mol_type = other RNA
aaataaataaataaataaaaaaaaaaaaaaaaaaaaaaaaaaaaaaaaaaaaataaataaatataa

SEQ ID NO: 10653 - RNA, 66 nt, synthetic construct
  source 1..66: mol_type = other RNA
aaaaaaaaaaaaaaaaaaaaatataaaaaaaaaaaaaaaaaaaaaaaaaaaaaaaaaaaaaatata

SEQ ID NO: 10654 - RNA, 66 nt, synthetic construct
  source 1..66: mol_type = other RNA
aaaaaaaaaaaaaaaaaaaaaaaaaaaaaaaaaaaaaaaaaaaaaaaaaaatataaaaaaaatata

SEQ ID NO: 10655 - RNA, 66 nt, synthetic construct
  source 1..66: mol_type = other RNA
aaaaaaaaaaaaaaaaaaaaaaaaaaaaaaaaaaaaaaaaaaatataaaaaaaaaaaaaaaatata

SEQ ID NO: 10656 - RNA, 66 nt, synthetic construct
  source 1..66: mol_type = other RNA
aaaaaaaaaaaaaaaaaaaaatataaaaaaaaaaaaaaaaaaaaaaaaaaaaaaaaaataaatata

SEQ ID NO: 10657 - RNA, 66 nt, synthetic construct
  source 1..66: mol_type = other RNA
aaaaaaaaaaaaaaaaaaaaataaatataaaaaaaaaaaaaaaaaaaaaaaaaaaaaaaaaatata

SEQ ID NO: 10658 - RNA, 66 nt, synthetic construct
  source 1..66: mol_type = other RNA
aaaaaaaaaaaaaaaaaaaaatataaataaaaaaaaaaaaaaaaaaaaaaaaaaaaaaaaaatata

SEQ ID NO: 10659 - RNA, 66 nt, synthetic construct
  source 1..66: mol_type = other RNA
aaaaaaaaaaaaaaaaaaaaaaaaaaaaaaaaaaaaaaaaaaataaatataaaaaaaaaaaatata

SEQ ID NO: 10660 - RNA, 66 nt, synthetic construct
  source 1..66: mol_type = other RNA
aaaaaaaaaaaaaaaaaaaaaaaaaaaaaaaaaaaaaaaaatataaataaaaaaaaaaaaaatata

SEQ ID NO: 10661 - RNA, 66 nt, synthetic construct
  source 1..66: mol_type = other RNA
aaaaaaaaaaaaaaaaaaaaaaaaaaaaaaaaaaaaaaaaaaaaaaatataaaaaaaataaatata

SEQ ID NO: 10662 - RNA, 66 nt, synthetic construct
  source 1..66: mol_type = other RNA
aaaaaaaaaaaaaaaaaaaaaaaaaaaaaaaaaaaaaaaaaaatataaaaaaaaaaaataaatata

SEQ ID NO: 10663 - RNA, 66 nt, synthetic construct
  source 1..66: mol_type = other RNA
aaaaaaaaaaaaaaaaaaaaaaaaaaaaaaaaaaaaaaaaaaatataaataaaaaaaaaaaatata

SEQ ID NO: 10664 - RNA, 66 nt, synthetic construct
  source 1..66: mol_type = other RNA
aaaaaaaaaaaaaaaaaaaaaaaaaaaaaaaaaaaaaaaaaaaaataaaaaaaaaatataaatata

SEQ ID NO: 10665 - RNA, 66 nt, synthetic construct
  source 1..66: mol_type = other RNA
aaataaataaataaataaataaataaaaaaaaaaaaaaaataaataaataaatataaataaataaa

SEQ ID NO: 10666 - RNA, 66 nt, synthetic construct
  source 1..66: mol_type = other RNA
aaaaaaaaaaaaaaaaaaaaaaaaaaaaaaaaaaaaaaaataaataaataaataaataaatataat

SEQ ID NO: 10667 - RNA, 66 nt, synthetic construct
  source 1..66: mol_type = other RNA
aaaaaaaaaaaaaaaaaaaaaaaaaaaaaaataaataaatataaaaaaaaaaaaaaaaaaaatata

SEQ ID NO: 10668 - RNA, 66 nt, synthetic construct
  source 1..66: mol_type = other RNA
aaaaaaaaaaaaaaaaaaaaataaatataaataaaaaaaaaaaaaaaaaaaaaaaaaaaaaatata

SEQ ID NO: 10669 - RNA, 66 nt, synthetic construct
  source 1..66: mol_type = other RNA
aaaaaaaaaaaaaaaaaaaaataaatataaaaaaaaaaaaaaaaaaaaaaaaaaaaaataaatata

SEQ ID NO: 10670 - RNA, 66 nt, synthetic construct
  source 1..66: mol_type = other RNA
aaaaaaaaaaaaaaaaaaaaatataaataaataaaaaaaaaaaaaaaaaaaaaaaaaaaaaatata

SEQ ID NO: 10671 - RNA, 66 nt, synthetic construct
  source 1..66: mol_type = other RNA
aaaaaaaaaaaaaaaaaaaaatataaataaaaaaaaaaaaaaaaaaaaaaaaaaaaaataaatata

SEQ ID NO: 10672 - RNA, 66 nt, synthetic construct
  source 1..66: mol_type = other RNA
aaaaaaaaaaaaaaaaaaaaaaaaaaaaaaaaaaaaaaaaaaaaataaataaaaaatataaatata

SEQ ID NO: 10673 - RNA, 66 nt, synthetic construct
  source 1..66: mol_type = other RNA
aaaaaaaaaaaaaaaaaaaaaaaaaaaaaaaaaaaaaaaaaaataaatataaataaaaaaaatata

SEQ ID NO: 10674 - RNA, 66 nt, synthetic construct
  source 1..66: mol_type = other RNA
aaaaaaaaaaaaaaaaaaaaaaaaaaaaaaaaaaaaaaaaaaataaatataaaaaaaataaatata

SEQ ID NO: 10675 - RNA, 66 nt, synthetic construct
  source 1..66: mol_type = other RNA
aaaaaaaaaaaaaaaaaaaaaaaaaaaaaaaaaaaaaaataaataaatataaaaaaaaaaaatata

SEQ ID NO: 10676 - RNA, 66 nt, synthetic construct
  source 1..66: mol_type = other RNA
aaaaaaaaaaaaaaaaaaaaaaaaaaaaaaaaaaaaataaatataaataaaaaaaaaaaaaatata

SEQ ID NO: 10677 - RNA, 66 nt, synthetic construct
  source 1..66: mol_type = other RNA
aaaaaaaaaaaaaaaaaaatataaaaaaaaaaaaaaaaaaaaaaaaaaaaaaaataaataaatata

SEQ ID NO: 10678 - RNA, 66 nt, synthetic construct
  source 1..66: mol_type = other RNA
aaaaaaaaaaaaaaaaaaaaaaaaaaaaaaaaaaaaaaaaaaaaaaatataaaataaataaatata

SEQ ID NO: 10679 - RNA, 66 nt, synthetic construct
  source 1..66: mol_type = other RNA
aaaaaaaaaaaaaaaaaaaaaaaaaaaaaaaaaaaaaaaaaaaaaaatataaataaataaaatata

SEQ ID NO: 10680 - RNA, 66 nt, synthetic construct
  source 1..66: mol_type = other RNA
aaaaaaaaaaaaaaaaaaaaaaaaaaaaaaaaaaaaaaaaaaaaaaatataaataaaataaatata

SEQ ID NO: 10681 - RNA, 66 nt, synthetic construct
  source 1..66: mol_type = other RNA
aaaaaaaaaaaaaaaaaaaaaaaaaaaaaaaaaaaaaaaaaaatataaataaaaaaaataaatata

SEQ ID NO: 10682 - RNA, 66 nt, synthetic construct
  source 1..66: mol_type = other RNA
aaataaataaataaataaataaataaataaaaaaaaaaaataaataaataaatataaataaataaa

SEQ ID NO: 10683 - RNA, 66 nt, synthetic construct
  source 1..66: mol_type = other RNA
aaaaaaaaaaaaaaaaaaaaaaaaaaaaaaataaataaatataaataaaaaaaaaaaaaaaatata

SEQ ID NO: 10684 - RNA, 66 nt, synthetic construct
  source 1..66: mol_type = other RNA
aaaaaaaaaaaaaaaaaaaaataaatataaataaaaaaaaaaaaaaaaaaaaaaaaaataaatata

SEQ ID NO: 10685 - RNA, 66 nt, synthetic construct
  source 1..66: mol_type = other RNA
aaaaaaaaaaaaaaaaaaaaatataaataaataaaaaaaaaaaaaaaaaaaaaaaaaataaatata

SEQ ID NO: 10686 - RNA, 66 nt, synthetic construct
  source 1..66: mol_type = other RNA
aaaaaaaaaaatataaataaataaataaaaaaaaaaaaaaaaaaaaaaaaaaaaaaaaaaaatata

SEQ ID NO: 10687 - RNA, 66 nt, synthetic construct
  source 1..66: mol_type = other RNA
aaaaaaaaaaaaaaaaaaaaaaaaaaaaaaaaaaaaaaatataaaaaaaataaataaataaatata

SEQ ID NO: 10688 - RNA, 66 nt, synthetic construct
  source 1..66: mol_type = other RNA
aaaaaaaaaaaaaaaaaaaaaaaaaaaaaaaaaaaaaaaaataaataaataaaaaatataaatata

SEQ ID NO: 10689 - RNA, 66 nt, synthetic construct
  source 1..66: mol_type = other RNA
aaaaaaaaaaaaaaaaaaaaaaaaaaaaaaaaaaaaaaataaataaatataaataaaaaaaatata

SEQ ID NO: 10690 - RNA, 66 nt, synthetic construct
  source 1..66: mol_type = other RNA
aaaaaaaaaaaaaaaaaaaaaaaaaaaaaaaaaaaaaaaaaaataaatataaataaaataaatata

SEQ ID NO: 10691 - RNA, 66 nt, synthetic construct
  source 1..66: mol_type = other RNA
aaaaaaaaaaaaaaaaaaaaaaaaaaaaaaaaaaaaataaatataaataaaaaaaaaataaatata

SEQ ID NO: 10692 - RNA, 66 nt, synthetic construct
  source 1..66: mol_type = other RNA
aaaaaaaaaaaaaaaaaaaaaaaaaaaaaaaaaaaaaaataaataaatataaaaaaaataaatata

SEQ ID NO: 10693 - RNA, 66 nt, synthetic construct
  source 1..66: mol_type = other RNA
aaaaaaaaaaaaaaataaatataaaaaaaaaaaaaaaaaaaaaaaaaaaaaaaataaataaatata

SEQ ID NO: 10694 - RNA, 66 nt, synthetic construct
  source 1..66: mol_type = other RNA
aaaaaaaaaaaaaaaaaaatataaaaaaaaaaaaaaaaaaaaaaaaaaaataaataaataaatata

SEQ ID NO: 10695 - RNA, 66 nt, synthetic construct
  source 1..66: mol_type = other RNA
aaaaaaaaaaaaaaaaaaaaaaaaaaaaaaaaaaaaaaaaaaataaatataaaataaataaatata

SEQ ID NO: 10696 - RNA, 66 nt, synthetic construct
  source 1..66: mol_type = other RNA
aaaaaaaaaaaaaaaaaaaaaaaaaaaaaaaaaaaaaaaaaaatataaataaataaaataaatata

SEQ ID NO: 10697 - RNA, 66 nt, synthetic construct
  source 1..66: mol_type = other RNA
aaaaaaaaaaaaaaaaaaaaaaaaaaaaaaaaaaaaaaataaataaatataaataaaataaatata

SEQ ID NO: 10698 - RNA, 66 nt, synthetic construct
  source 1..66: mol_type = other RNA
aaaaaaaaaaaaaaataaatataaaaaaaaaaaaaaaaaaaaaaaaaaaataaataaataaatata

SEQ ID NO: 10699 - RNA, 66 nt, synthetic construct
  source 1..66: mol_type = other RNA
aaaaaaaaaaaaaaaaaataaataaatataaataaataaaaaaaaaaaaaaaaaaaaaaaaatata

SEQ ID NO: 10700 - RNA, 66 nt, synthetic construct
  source 1..66: mol_type = other RNA
aaataaaaaaaaaaaaaaaaataaaaaaaaaaaaaaaaaaaaaaaaaaaaaaaaaaaaaaaatata

SEQ ID NO: 10701 - RNA, 66 nt, synthetic construct
  source 1..66: mol_type = other RNA
aaataaaaaaaaaaaaaaaaaaaaaaaaaaaaaaaaaaaaaaaaaaaaaaaaataaaaaaaatata

SEQ ID NO: 10702 - RNA, 66 nt, synthetic construct
  source 1..66: mol_type = other RNA
aaaataaataaataaataaatataaataaataaaaaaaaaaaaaaaaaaaaaaaaaaaaaaatata

SEQ ID NO: 10703 - RNA, 66 nt, synthetic construct
  source 1..66: mol_type = other RNA
aaaaaaatataaataaataaataaataaaaaaaaaaaaaaaaaaaaaaaaaaaataaataaatata

SEQ ID NO: 10704 - RNA, 66 nt, synthetic construct
  source 1..66: mol_type = other RNA
aaataaataaaaaaaaaataaaaaaaaaaaaaaaaaaaaaaaaaaaaaaaaaaaaaaaaaaatata

SEQ ID NO: 10705 - RNA, 66 nt, synthetic construct
  source 1..66: mol_type = other RNA
aaaataaataaataaataaatataaataaataaataaaaaaaaaaaaaaaaaaaaaaaaaaatata

SEQ ID NO: 10706 - RNA, 66 nt, synthetic construct
  source 1..66: mol_type = other RNA
aaataaaaaaaaaaaaaaaaaaaaaaaaaaaaaaaaaaaaataaataaataaaaaaaaaaaatata

SEQ ID NO: 10707 - RNA, 66 nt, synthetic construct
  source 1..66: mol_type = other RNA
aaataaaaaaaaaaaaaaaaaaaaaaaaaaaaaaaaaaaaaaaaataaataaaaaaaataaatata

SEQ ID NO: 10708 - RNA, 66 nt, synthetic construct
  source 1..66: mol_type = other RNA
aaataaataaaaaaaaaataaataaaaaaaaaaaaaaaaaaaaaaaaaaaaaaaaaaaaaaatata

SEQ ID NO: 10709 - RNA, 66 nt, synthetic construct
  source 1..66: mol_type = other RNA
aaataaaaaaaaaaaaaaaaaaaaaaaaaaaaaaaaaaaaataaataaataaaaaaaataaatata

SEQ ID NO: 10710 - RNA, 66 nt, synthetic construct
  source 1..66: mol_type = other RNA
aaaaaaaaaaaaaaaaaaaaaaaaaaaaaaaaaaaaaaaaaaaaataaaaaaaaaaaaaatatata

SEQ ID NO: 10711 - RNA, 66 nt, synthetic construct
  source 1..66: mol_type = other RNA
aaaaaaaaaaaaaaaaaaaaaaaaaaaaaaaaaaaaaaaaaaaaataaataaaaaaaaaatatata

SEQ ID NO: 10712 - RNA, 67 nt, synthetic construct
  source 1..67: mol_type = other RNA
aaaaaaaaaaaaaaaaaaaaaaaaaaaaaaaaaaaaaaaaaaaaaaaaaaaaaaaaaaaaaaatata

SEQ ID NO: 10713 - RNA, 67 nt, synthetic construct
  source 1..67: mol_type = other RNA
aaaaaaaaaaaaaaaaaaaaaaaaaaaaaaaaaaaaaaaaaaaaaaaaaaaaaaaaaaataaatata

SEQ ID NO: 10714 - RNA, 67 nt, synthetic construct
  source 1..67: mol_type = other RNA
aaaaaaaaaaaaaaaaaaaaaaaaaaaaaaaaaaaaaaaaaaaaaaaaaaaaaaaaatataaatata

SEQ ID NO: 10715 - RNA, 67 nt, synthetic construct
  source 1..67: mol_type = other RNA
aaataaaaaaaaaaaaaaaaaaaaaaaaaaaaaaaaaaaaaaaaaaaaaaaaaaaaaaaaaaatata

SEQ ID NO: 10716 - RNA, 67 nt, synthetic construct
  source 1..67: mol_type = other RNA
aaaaaaaaaaaaaaaaaaaaaaaaaaaaaaaaaaaaaaaaaaaaaaaaaaaaaaaaaaaaatatata

SEQ ID NO: 10717 - RNA, 67 nt, synthetic construct
  source 1..67: mol_type = other RNA
aaaaaaaaaaaaaaaaaaaaaaaaaaaaaaaaaaaaaaaaaaaaaaaaaaaaaaaaaaaaaaaataa

SEQ ID NO: 10718 - RNA, 67 nt, synthetic construct
  source 1..67: mol_type = other RNA
aaaaaaaaaaaaaaaaaaaaaaaaaaaaaaaaaaaaaaaaaaaaaaaaaaaaaaaaaaataaataaa

SEQ ID NO: 10719 - RNA, 67 nt, synthetic construct
  source 1..67: mol_type = other RNA
aaaaaaaaaaaaaaaaaaaaaaaaaaaaaaaaaaaaaaataaataaataaataaataaataaataaa

SEQ ID NO: 10720 - RNA, 67 nt, synthetic construct
  source 1..67: mol_type = other RNA
aaaaaaaaaaaaaaaaaaaaaaaaaaaaaaaaaaaaaaaaaaaaaaaaaaaaaaaaatataaataaa

SEQ ID NO: 10721 - RNA, 67 nt, synthetic construct
  source 1..67: mol_type = other RNA
aaataaaaaaaaaaaaaaaaaaaaaaaaaaaaaaaaaaaaaaaaaaaaaaaaaaaaaaaaaaaataa

SEQ ID NO: 10722 - RNA, 67 nt, synthetic construct
  source 1..67: mol_type = other RNA
aaataaataaaaaaaaaaaaaaaaaaaaaaaaaaaaaaaaaaaaaaaaaaaaaaaaaaaaaaaataa

SEQ ID NO: 10723 - RNA, 67 nt, synthetic construct
  source 1..67: mol_type = other RNA
aaataaataaataaaaaaaaaaaaaaaaaaaaaaaaaaaaaaaaaaaaaaaaaaaaaaaaaaaataa

SEQ ID NO: 10724 - RNA, 67 nt, synthetic construct
  source 1..67: mol_type = other RNA
aaataaataaataaataaaaaaaaaaaaaaaaaaaaaaaaaaaaaaaaaaaaaaaaaaaaaaaataa

SEQ ID NO: 10725 - RNA, 67 nt, synthetic construct
  source 1..67: mol_type = other RNA
aaaaaaaaaaaaaaaaaaaaaaaaaaaaaaaaaaaaataaatataaataaataaataaataaataaa

SEQ ID NO: 10726 - RNA, 67 nt, synthetic construct
  source 1..67: mol_type = other RNA
aaaaaaaaaaaaaaaaaaaaaaaaaaaaaaaaaaaaatataaataaataaataaataaataaataaa

SEQ ID NO: 10727 - RNA, 67 nt, synthetic construct
  source 1..67: mol_type = other RNA
aaaaaaaaaaaaaaaaaaaaaaaaaaaaaaaaaaaaataaataaatataaataaataaataaataaa

SEQ ID NO: 10728 - RNA, 67 nt, synthetic construct
  source 1..67: mol_type = other RNA
aaaaaaaaaaaaaaaaaaaaaaaaaaaaaaaaataaataaatataaataaataaataaataaataaa

SEQ ID NO: 10729 - RNA, 67 nt, synthetic construct
  source 1..67: mol_type = other RNA
aaaaaaaaaaaaaaaaaaaaaaaaaaaaaaaaataaatataaataaataaataaataaataaataaa

SEQ ID NO: 10730 - RNA, 67 nt, synthetic construct
  source 1..67: mol_type = other RNA
aaaaaaaaaaaaaaaaaaaaaaaaaaaaaaaaataaataaataaatataaataaataaataaataaa

SEQ ID NO: 10731 - RNA, 67 nt, synthetic construct
  source 1..67: mol_type = other RNA
aaataaataaataaataaataaataaaaaaaaaaaaaaaaaaaaaaaaaaaataaataaataaataa

SEQ ID NO: 10732 - RNA, 67 nt, synthetic construct
  source 1..67: mol_type = other RNA
aaaaaaaaaaaaaaaaaaaaaaaaaaaaaaaaaaaaaaaaaaaaaaaaaaaaaaaaaaataaataat

SEQ ID NO: 10733 - RNA, 67 nt, synthetic construct
  source 1..67: mol_type = other RNA
aaataaataaataaataaataaataaataaataaaaaaaaaaaaaaaaaaaataaataaataaataa

SEQ ID NO: 10734 - RNA, 67 nt, synthetic construct
  source 1..67: mol_type = other RNA
aaaaaaaaaaaaaaaaaaaaaaaaaaaaaaaaaaaaaaaaaaaaaaaataaaaaaaaaaaaaatata

SEQ ID NO: 10735 - RNA, 67 nt, synthetic construct
  source 1..67: mol_type = other RNA
aaaaaaaaaaaaaaaaaaaaaaaaaaaaaaaaaaaaaaaaataaaaaaaaaaaaaaaaaaaaatata

SEQ ID NO: 10736 - RNA, 67 nt, synthetic construct
  source 1..67: mol_type = other RNA
aaaaaaaaaaaaaaaaaaaataaaaaaaaaaaaaaaaaaaaaaaaaaaaaaaaaaaaaaaaaatata

SEQ ID NO: 10737 - RNA, 67 nt, synthetic construct
  source 1..67: mol_type = other RNA
aaaaaaaaaaaaaaaaaataaaaaaaaaaaaaaaaaaaaaaaaaaaaaaaaaaaaaaaaaaaatata

SEQ ID NO: 10738 - RNA, 67 nt, synthetic construct
  source 1..67: mol_type = other RNA
aaaaaaaaaaaataaaaaaaaaaaaaaaaaaaaaaaaaaaaaaaaaaaaaaaaaaaaaaaaaatata

SEQ ID NO: 10739 - RNA, 67 nt, synthetic construct
  source 1..67: mol_type = other RNA
aaaaaaaaaaaaaaaataaaaaaaaaaaaaaaaaaaaaaaaaaaaaaaaaaaaaaaaaaaaaatata

SEQ ID NO: 10740 - RNA, 67 nt, synthetic construct
  source 1..67: mol_type = other RNA
aaaaaaaaaataaaaaaaaaaaaaaaaaaaaaaaaaaaaaaaaaaaaaaaaaaaaaaaaaaaatata

SEQ ID NO: 10741 - RNA, 67 nt, synthetic construct
  source 1..67: mol_type = other RNA
aaaaaaataaaaaaaaaaaaaaaaaaaaaaaaaaaaaaaaaaaaaaaaaaaaaaaaaaaaaaatata

SEQ ID NO: 10742 - RNA, 67 nt, synthetic construct
  source 1..67: mol_type = other RNA
aaaaaaaaaaaaaaaaataaaaaaaaaaaaaaaaaaaaaaaaaaaaaaaaaaaaaaaaaaaaatata

SEQ ID NO: 10743 - RNA, 67 nt, synthetic construct
  source 1..67: mol_type = other RNA
aaaaataaaaaaaaaaaaaaaaaaaaaaaaaaaaaaaaaaaaaaaaaaaaaaaaaaaaaaaaatata

SEQ ID NO: 10744 - RNA, 67 nt, synthetic construct
  source 1..67: mol_type = other RNA
aaaaaaaaaaaaaaataaaaaaaaaaaaaaaaaaaaaaaaaaaaaaaaaaaaaaaaaaaaaaatata

SEQ ID NO: 10745 - RNA, 67 nt, synthetic construct
  source 1..67: mol_type = other RNA
aaaaaaaaaaaaaaaaaaaaaaaaaaaaaaaaaaaaaaaaaaaaaaaaaaaaaaataaaaaaatata

SEQ ID NO: 10746 - RNA, 67 nt, synthetic construct
  source 1..67: mol_type = other RNA
aaaaaaaaaaaaaaaaaaaaaaaaaaaaaaaaaaaaaaaaaaaataaaaaaaaaaaaaaaaaatata

SEQ ID NO: 10747 - RNA, 67 nt, synthetic construct
  source 1..67: mol_type = other RNA
aaaaaaaaaaaaaaaaaaaaaaaaaaaaaaaaaaaaaaaaaaataaaaaaaaaaaaaaaaaaatata

SEQ ID NO: 10748 - RNA, 67 nt, synthetic construct
  source 1..67: mol_type = other RNA
aaaaaaaaaaaaaaaaaaaaataaaaaaaaaaaaaaaaaaaaaaaaaaaaaaaaaaaaaaaaatata

SEQ ID NO: 10749 - RNA, 67 nt, synthetic construct
  source 1..67: mol_type = other RNA
aaaaaaaaaaaaaaaaaaaaaaaaaaaaaaaaaaaaaataaaaaaaaaaaaaaaaaaaaaaaatata

SEQ ID NO: 10750 - RNA, 67 nt, synthetic construct
  source 1..67: mol_type = other RNA
aaaaaaaaaaataaaaaaaaaaaaaaaaaaaaaaaaaaaaaaaaaaaaaaaaaaaaaaaaaaatata

SEQ ID NO: 10751 - RNA, 67 nt, synthetic construct
  source 1..67: mol_type = other RNA
aaaaaaaaaaaaaaaaaaaaaaaaaaaaataaaaaaaaaaaaaaaaaaaaaaaaaaaaaaaaatata

SEQ ID NO: 10752 - RNA, 67 nt, synthetic construct
  source 1..67: mol_type = other RNA
aaaaaaaaaaaaaaaaaaaaaaaaaaaaaaaaaaaaaaaaaataaaaaaaaaaaaaaaaaaaatata

SEQ ID NO: 10753 - RNA, 67 nt, synthetic construct
  source 1..67: mol_type = other RNA
aaaaaaaaaaaaaaaaaaaaaaaaaaaaaaaaaaaaaaaaaaaaaaaaaaaataaaaaaaaaatata

SEQ ID NO: 10754 - RNA, 67 nt, synthetic construct
  source 1..67: mol_type = other RNA
aaaaaaaaaaaaaaaaaaaaaaaaaaaaaaaaaaaaaaaaaaaaaataaaaaaaaaaaaaaaatata

SEQ ID NO: 10755 - RNA, 67 nt, synthetic construct
  source 1..67: mol_type = other RNA
aaaaaaaaaaaaaaaaaaaaaaaaaaaaaaaaaaaaaaaaaaaaaaaaaaaaaataaaaaaaatata

SEQ ID NO: 10756 - RNA, 67 nt, synthetic construct
  source 1..67: mol_type = other RNA
aaaaaaaaaaaaaaaaaaaaaaaataaaaaaaaaaaaaaaaaaaaaaaaaaaaaaaaaaaaaatata

SEQ ID NO: 10757 - RNA, 67 nt, synthetic construct
  source 1..67: mol_type = other RNA
aaaaaaaaaaaaaaaaaaaaaataaaaaaaaaaaaaaaaaaaaaaaaaaaaaaaaaaaaaaaatata

SEQ ID NO: 10758 - RNA, 67 nt, synthetic construct
  source 1..67: mol_type = other RNA
aaaaaaaaaaaaaaaaaaaaaaaaaaaaaaaaaaaaaaaaaaaaaaaaaataaaaaaaaaaaatata

SEQ ID NO: 10759 - RNA, 67 nt, synthetic construct
  source 1..67: mol_type = other RNA
aaaaaaaaaaaaaaaaaaaaaaaaaaaataaaaaaaaaaaaaaaaaaaaaaaaaaaaaaaaaatata

SEQ ID NO: 10760 - RNA, 67 nt, synthetic construct
  source 1..67: mol_type = other RNA
aaaaaaaaaaaaaaaaaaaaaaaaaaaaaaaaaaaaaaaataaaaaaaaaaaaaaaaaaaaaatata

SEQ ID NO: 10761 - RNA, 67 nt, synthetic construct
  source 1..67: mol_type = other RNA
aaaaaaaaataaaaaaaaaaaaaaaaaaaaaaaaaaaaaaaaaaaaaaaaaaaaaaaaaaaaatata

SEQ ID NO: 10762 - RNA, 67 nt, synthetic construct
  source 1..67: mol_type = other RNA
aaaaaaaaaaaaaaaaaaaaaaaaaaaaaaaaaaaaataaataaaaaaaaaaaaaaaaaaaaatata

SEQ ID NO: 10763 - RNA, 67 nt, synthetic construct
  source 1..67: mol_type = other RNA
aaaaaaaaaaaaaaaaaaaaaaaaaaaaaaaaaaaaaaaataaataaaaaaaaaaaaaaaaaatata

SEQ ID NO: 10764 - RNA, 67 nt, synthetic construct
  source 1..67: mol_type = other RNA
aaaaaaaaaaaaaaaaaaaaaaaaaaaaaaaaaaaaaaaaaaaataaataaaaaaaaaaaaaatata

SEQ ID NO: 10765 - RNA, 67 nt, synthetic construct
  source 1..67: mol_type = other RNA
aaaaaaaaaaaaaaaaataaaaaaaaaaaaaaaaaaaaaaaaaaaaaaaaaaaaaaaaataaatata

SEQ ID NO: 10766 - RNA, 67 nt, synthetic construct
  source 1..67: mol_type = other RNA
aaaaaaaaaaaaaaaaaaaaaaaaaaaaaaaaaaaaaaaaaaaaaataaaaaaaaaaaataaatata

SEQ ID NO: 10767 - RNA, 67 nt, synthetic construct
  source 1..67: mol_type = other RNA
aaaaataaaaaaaaaaaaaaaaaaaaaaaaaaaaaaaaaaaaaaaaaaaaaaaaaaaaataaatata

SEQ ID NO: 10768 - RNA, 67 nt, synthetic construct
  source 1..67: mol_type = other RNA
aaaaaaaaaaataaaaaaaaaaaaaaaaaaaaaaaaaaaaaaaaaaaaaaaaaaaaaaataaatata

SEQ ID NO: 10769 - RNA, 67 nt, synthetic construct
  source 1..67: mol_type = other RNA
aaaaaaaaaataaaaaaaaaaaaaaaaaaaaaaaaaaaaaaaaaaaaaaaaaaaaaaaataaatata

SEQ ID NO: 10770 - RNA, 67 nt, synthetic construct
  source 1..67: mol_type = other RNA
aaaaaaaaaaaaaaaaaaaaaaaaaaaaaaaaaaaaaaaaaaaaaaaaaaaaaataaaataaatata

SEQ ID NO: 10771 - RNA, 67 nt, synthetic construct
  source 1..67: mol_type = other RNA
aaaaaaaaaaaaaaaaaaaaaaaaaaaaaaaaaaaaaaaaaaaaaaaaaaaataaaaaataaatata

SEQ ID NO: 10772 - RNA, 67 nt, synthetic construct
  source 1..67: mol_type = other RNA
aaaaaaaaaaaataaaaaaaaaaaaaaaaaaaaaaaaaaaaaaaaaaaaaaaaaaaaaataaatata

SEQ ID NO: 10773 - RNA, 67 nt, synthetic construct
  source 1..67: mol_type = other RNA
aaaaaaaaaaaaaaaaaaaaaaaaaaaaaaaaaaaaaaaaaaaaaaaataaaaaaaaaataaatata

SEQ ID NO: 10774 - RNA, 67 nt, synthetic construct
  source 1..67: mol_type = other RNA
aaaaaaaaaaaaaaaaaaaaaaaaaaaaaaaaaaaaaaaaaataaaaaaaaaaaaaaaataaatata

SEQ ID NO: 10775 - RNA, 67 nt, synthetic construct
  source 1..67: mol_type = other RNA
aaaaaaaaaaaaaaaaaaaaaaaaaaaaaaaaaaaaaaaaaataaataaaaaaaaaaaaaaaatata

SEQ ID NO: 10776 - RNA, 67 nt, synthetic construct
  source 1..67: mol_type = other RNA
aaaaaaataaataaaaaaaaaaaaaaaaaaaaaaaaaaaaaaaaaaaaaaaaaaaaaaaaaaatata

SEQ ID NO: 10777 - RNA, 67 nt, synthetic construct
  source 1..67: mol_type = other RNA
aaaaaaaaaaaaaaaaaaaaaaaaaaaaaaaaaaaaaaaataaataaataaaaaaaaaaaaaatata

SEQ ID NO: 10778 - RNA, 67 nt, synthetic construct
  source 1..67: mol_type = other RNA
aaaaaaaaaaaaaaaaaaaaaaaaaaaaaaaaaaaaaaaaaaaaaaaataaataaaaaataaatata

SEQ ID NO: 10779 - RNA, 67 nt, synthetic construct
  source 1..67: mol_type = other RNA
aaaaaaaaaaaaaaaaaaaaaaaaaaaaaaaaaaaaaaaaaataaataaaaaaaaaaaataaatata

SEQ ID NO: 10780 - RNA, 67 nt, synthetic construct
  source 1..67: mol_type = other RNA
aaaaaaataaataaaaaaaaaaaaaaaaaaaaaaaaaaaaaaaaaaaaaaaaaaaaaaataaatata

SEQ ID NO: 10781 - RNA, 67 nt, synthetic construct
  source 1..67: mol_type = other RNA
aaaaaaaaaaaaaaaaaaaaaaaaaaaaaaaaaaaaaaaaaaaataaatataaataaataaatataa

SEQ ID NO: 10782 - RNA, 67 nt, synthetic construct
  source 1..67: mol_type = other RNA
aaaaaaaaaaaaaaaaaaaaaaaaaaaaaaaaaaaaaaaaaaaaaaaaaaaaaaaaaaaataatata

SEQ ID NO: 10783 - RNA, 67 nt, synthetic construct
  source 1..67: mol_type = other RNA
aaaaaaaaaaaaaaaaaaaaaaaaaaaaaaaaaaaaaaaataaataaatataaataaataaatataa

SEQ ID NO: 10784 - RNA, 67 nt, synthetic construct
  source 1..67: mol_type = other RNA
aaataaataaataaataaataaatataaaaaaaaaaaaaaaaaaaaaaaaaataaataaataaataa

SEQ ID NO: 10785 - RNA, 67 nt, synthetic construct
  source 1..67: mol_type = other RNA
aaaaaaaaaaaaaaaaaaaaaaaaaaaaaaaaaaaaaaaaaaaaaaaaaaaaaaaaaaaaatataat

SEQ ID NO: 10786 - RNA, 67 nt, synthetic construct
  source 1..67: mol_type = other RNA
aaataaataaataaataaataaatataaaaaaaaaaaaaaaaaaaaaataaataaataaataaataa

SEQ ID NO: 10787 - RNA, 67 nt, synthetic construct
  source 1..67: mol_type = other RNA
aaaaaaaaaaaaaaaaaaaaaaaaaaaaaaaaaaaaaaaaaaaaaaaaaaaaaaaaatataaataat

SEQ ID NO: 10788 - RNA, 67 nt, synthetic construct
  source 1..67: mol_type = other RNA
aaaaaaaaaaaaaaaaaaaaaaaaaaaaaaaaaaaaaaataaataaataaataaatatataaataaa

SEQ ID NO: 10789 - RNA, 67 nt, synthetic construct
  source 1..67: mol_type = other RNA
aaaaaaaaaatataaaaaaaaaaaaaaaaaaaaaaaaaaaaaaaaaaaaaaaaaaaaaaaaaatata

SEQ ID NO: 10790 - RNA, 67 nt, synthetic construct
  source 1..67: mol_type = other RNA
aaaaaaaaaatataaataaaaaaaaaaaaaaaaaaaaaaaaaaaaaaaaaaaaaaaaaaaaaatata

SEQ ID NO: 10791 - RNA, 67 nt, synthetic construct
  source 1..67: mol_type = other RNA
aaaaatataaaaaaaaaaaaaaaaaaaaaaaaaaaaaaaaaaaaaaaaaaaaaaaaaaataaatata

SEQ ID NO: 10792 - RNA, 67 nt, synthetic construct
  source 1..67: mol_type = other RNA
aaaaaaaaaaaaaaaaaaaaaaaaaaaaaaaaaaaaaaaaaaaaaaaaaaaatataaaataaatata

SEQ ID NO: 10793 - RNA, 67 nt, synthetic construct
  source 1..67: mol_type = other RNA
aaaaatataaataaaaaaaaaaaaaaaaaaaaaaaaaaaaaaaaaaaaaaaaaaaaaaaaaaatata

SEQ ID NO: 10794 - RNA, 67 nt, synthetic construct
  source 1..67: mol_type = other RNA
aaaaaaaaaaaataaaaaaaaaaaaaaaaaaaaaaaaaaaaaaaaaaaaaaaaaaaatataaatata

SEQ ID NO: 10795 - RNA, 67 nt, synthetic construct
  source 1..67: mol_type = other RNA
aaaaaaaaaaaaaaaaaaaaaaaaaaaaaaaaaaaaaaaaaaaaaatataaaaaaaaaataaatata

SEQ ID NO: 10796 - RNA, 67 nt, synthetic construct
  source 1..67: mol_type = other RNA
aaaaaaaaatataaaaaaaaaaaaaaaaaaaaaaaaaaaaaaaaaaaaaaaaaaaaaaataaatata

SEQ ID NO: 10797 - RNA, 67 nt, synthetic construct
  source 1..67: mol_type = other RNA
aaaaaaaaaaaaaaaaaaaaaaaaaaaaaaaaaaaaaaaaaataaaaaaaaaaaaaatataaatata

SEQ ID NO: 10798 - RNA, 67 nt, synthetic construct
  source 1..67: mol_type = other RNA
aaaaaaaaaaaaaaaaaaaaaaaaaaaaaaaaaaaaaaaaaaaaaaaataaatataaaaaaaatata

SEQ ID NO: 10799 - RNA, 67 nt, synthetic construct
  source 1..67: mol_type = other RNA
aaaaaaaaaaaaaaaaaaaaaaaaaaaaaaaaaaaaaaaaaataaatataaaaaaaaaaaaaatata

SEQ ID NO: 10800 - RNA, 67 nt, synthetic construct
  source 1..67: mol_type = other RNA
aaaaaaaaaaaaaaaaaaaaaaaaaaaaaaaaaaaaaaaaaaaaaatataaataaaaaaaaaatata

SEQ ID NO: 10801 - RNA, 67 nt, synthetic construct
  source 1..67: mol_type = other RNA
aaaaaaaaaaaaaaaaaaaaaaaaaaaaaaaaaaaaaaaaaaaaaaaataaaaaaaatataaatata

SEQ ID NO: 10802 - RNA, 67 nt, synthetic construct
  source 1..67: mol_type = other RNA
aaaaataaaaaaaaaaaaaaaaaaaaaaaaaaaaaaaaaaaaaaaaaaaaaaaaaaatataaatata

SEQ ID NO: 10803 - RNA, 67 nt, synthetic construct
  source 1..67: mol_type = other RNA
aaaaatataaataaaaaaaaaaaaaaaaaaaaaaaaaaaaaaaaaaaaaaaaaaaaaaataaatata

SEQ ID NO: 10804 - RNA, 67 nt, synthetic construct
  source 1..67: mol_type = other RNA
aaaaaaaaaaaaaaaaaaaaaaaaaaaaaaaaaaaaaaaaaaaaaaaataaatataaaataaatata

SEQ ID NO: 10805 - RNA, 67 nt, synthetic construct
  source 1..67: mol_type = other RNA
aaaaaaaaaaaaaaaaaaaaaaaaaaaaaaaaaaaaaaaaaataaatataaaaaaaaaataaatata

SEQ ID NO: 10806 - RNA, 67 nt, synthetic construct
  source 1..67: mol_type = other RNA
aaaaaaaaaaaaaaaaaaaaaaaaaaaaaaaaaaaaaaaaaaaaaatataaataaaaaataaatata

SEQ ID NO: 10807 - RNA, 67 nt, synthetic construct
  source 1..67: mol_type = other RNA
aaaaaaaaaaaaaaaaaaaaaaaaaaaaaaaaaaaaaaaaaataaatataaataaaaaataaatata

SEQ ID NO: 10808 - RNA, 67 nt, synthetic construct
  source 1..67: mol_type = other RNA
aaaaaaaaaaaaaaaaaaaaaaaaaaaaaaaaaaaaaaaaaaaaaaaaaaaaaaaaaaaaaaatatt

SEQ ID NO: 10809 - RNA, 67 nt, synthetic construct
  source 1..67: mol_type = other RNA
aaaaaaaataaataaaaaaaaaaaaaaaaaaaaaaaaaaaaaaaaaaaatataaataaataaatata

SEQ ID NO: 10810 - RNA, 67 nt, synthetic construct
  source 1..67: mol_type = other RNA
aaaaaaaaaaaaaaaaaaaaaaaaaaaaaaaaaaaaaaaaaaaataaatataaataaataaatatat

SEQ ID NO: 10811 - RNA, 67 nt, synthetic construct
  source 1..67: mol_type = other RNA
aaaaaaaaaaaaaatataaataaataaataaaaaaaaaaaaaaaaaaaaaaaaaataaataaatata

SEQ ID NO: 10812 - RNA, 67 nt, synthetic construct
  source 1..67: mol_type = other RNA
aaaaaaaataaataaaaaaaaaaaaaaaaaaaaaaaaaaaaaaaataaatataaataaataaatata

SEQ ID NO: 10813 - RNA, 68 nt, synthetic construct
  source 1..68: mol_type = other RNA
aaaaaaaaaaaaaaaaaaaaaaaaaaaaaaaaaaaaaaaaaaaaaaaaaaaaaaaaaaaataaatata

SEQ ID NO: 10814 - RNA, 68 nt, synthetic construct
  source 1..68: mol_type = other RNA
aaaaaaaaaaaaaaaaaaaaaaaaaaaaaaaaaaaaaatataaataaataaataaataaataaatata

SEQ ID NO: 10815 - RNA, 68 nt, synthetic construct
  source 1..68: mol_type = other RNA
aaaaaaaaaaaaaaaaaaaaaaaaaaaaaaaaaataaatataaataaataaataaataaataaatata

SEQ ID NO: 10816 - RNA, 68 nt, synthetic construct
  source 1..68: mol_type = other RNA
aaataaataaaaaaaaaaaaaaaaaaaaaaaaaaaaaaaaaaaaaaaaaaaaaaaataaataaatata

SEQ ID NO: 10817 - RNA, 68 nt, synthetic construct
  source 1..68: mol_type = other RNA
aaaaaaaaaaaaaaaaaaaaaaaaaaaaaaaaaaaaaaaaaaaaaaaaaaaaaaaaaaaaaaaataaa

SEQ ID NO: 10818 - RNA, 68 nt, synthetic construct
  source 1..68: mol_type = other RNA
aaaaaaaaaaaaaaaaaaaaaaaaaaaaaaaaaaaaaaaaaaaaaaaaaaaaaaaaaaaataaataaa

SEQ ID NO: 10819 - RNA, 68 nt, synthetic construct
  source 1..68: mol_type = other RNA
aaataaataaaaaaaaaaaaaataaataaataaataaatataaataaataaataaataaataaatata

SEQ ID NO: 10820 - RNA, 68 nt, synthetic construct
  source 1..68: mol_type = other RNA
aaataaataaaaaaaaaataaataaataaataaataaatataaataaataaataaataaataaatata

SEQ ID NO: 10821 - RNA, 68 nt, synthetic construct
  source 1..68: mol_type = other RNA
aaataaataaataaaaaaaaaataaataaataaataaatataaataaataaataaataaataaatata

SEQ ID NO: 10822 - RNA, 68 nt, synthetic construct
  source 1..68: mol_type = other RNA
aaataaataaataaaaaataaataaataaataaataaatataaataaataaataaataaataaatata

SEQ ID NO: 10823 - RNA, 68 nt, synthetic construct
  source 1..68: mol_type = other RNA
aaataaataaataaataaaaaataaataaataaataaatataaataaataaataaataaataaatata

SEQ ID NO: 10824 - RNA, 68 nt, synthetic construct
  source 1..68: mol_type = other RNA
aaaaaaaaaaaaaaaaaaaaaaaaaaaaaaaaaaaaataaaaaaaaaaaaaaaaaaaaaaaaaatata

SEQ ID NO: 10825 - RNA, 68 nt, synthetic construct
  source 1..68: mol_type = other RNA
aaaaaaaaaaaaaaaaaaaaaaaaaaaaaaaaaaaaaaaaaaaaaaataaaaaaaaaaaaaaaatata

SEQ ID NO: 10826 - RNA, 68 nt, synthetic construct
  source 1..68: mol_type = other RNA
aaaaaaaataaaaaaaaaaaaaaaaaaaaaaaaaaaaaaaaaaaaaaaaaaaaaaaaaaaaaaatata

SEQ ID NO: 10827 - RNA, 68 nt, synthetic construct
  source 1..68: mol_type = other RNA
aaaaaaaaaaaaaaaaaaaaaaaaaaaaaaaaaaaaataaataaaaaaaaaaaaaaaaaaaaaatata

SEQ ID NO: 10828 - RNA, 68 nt, synthetic construct
  source 1..68: mol_type = other RNA
aaaaaaaaaaaaaaaaaaaaaaaaaaaaaaaaataaataaaaaaaaaaaaaaaaaaaaaaaaaatata

SEQ ID NO: 10829 - RNA, 68 nt, synthetic construct
  source 1..68: mol_type = other RNA
aaaaaaaaaaaaaaaaaaaaaaaaaaaaaaaaaaaaaaaaaaaaaaataaataaaaaaaaaaaatata

SEQ ID NO: 10830 - RNA, 68 nt, synthetic construct
  source 1..68: mol_type = other RNA
aaaaaaaaaaaaaaataaaaaaaaaaaaaaaaaaaaaaaaaaaaaaaaaaaaaaaaaaaataaatata

SEQ ID NO: 10831 - RNA, 68 nt, synthetic construct
  source 1..68: mol_type = other RNA
aaaaaaaaaaaaaaaaaaaataaaaaaaaaaaaaaaaaaaaaaaaaaaaaaaaaaaaaaataaatata

SEQ ID NO: 10832 - RNA, 68 nt, synthetic construct
  source 1..68: mol_type = other RNA
aaaaaaaaaaaaaaaaataaaaaaaaaaaaaaaaaaaaaaaaaaaaaaaaaaaaaaaaaataaatata

SEQ ID NO: 10833 - RNA, 68 nt, synthetic construct
  source 1..68: mol_type = other RNA
aaaaaaaataaataaaaaaaaaaaaaaaaaaaaaaaaaaaaaaaaaaaaaaaaaaaaaaaaaaatata

SEQ ID NO: 10834 - RNA, 68 nt, synthetic construct
  source 1..68: mol_type = other RNA
aaaaaaataaaaaaaaaaaaaaaaaaaaaaaaaaaaaaaaaaaaaaaaaaaaaaaataaataaatata

SEQ ID NO: 10835 - RNA, 68 nt, synthetic construct
  source 1..68: mol_type = other RNA
aaaaaaaaaaaaaaaaaaaaaaaaaaaaataaataaaaaaaaaaaaaaaaaaaaaaaaaataaatata

SEQ ID NO: 10836 - RNA, 68 nt, synthetic construct
  source 1..68: mol_type = other RNA
aaaaaaataaataaaaaaaaaaaaaaaaaaaaaaaaaaaaaaaaaaaaaaaaaaaataaataaatata

SEQ ID NO: 10837 - RNA, 68 nt, synthetic construct
  source 1..68: mol_type = other RNA
aaaaaaaaaaaaaaaataaaaaaaaaaaaaaaaaaaaaaaaaaataaataaataaataaataaatata

SEQ ID NO: 10838 - RNA, 68 nt, synthetic construct
  source 1..68: mol_type = other RNA
aaaaaaaaaaaaaaaataaaaaaaaaaaaaaaaaaaaaaataaataaataaataaataaataaatata

SEQ ID NO: 10839 - RNA, 68 nt, synthetic construct
  source 1..68: mol_type = other RNA
aaataaataaataaataaatataaataaataaatataaataaataaataaatataaataaataaataa

SEQ ID NO: 10840 - RNA, 68 nt, synthetic construct
  source 1..68: mol_type = other RNA
aaataaataaataaataaataataaataaataaataaatataaataaataaataaataaataaatata

SEQ ID NO: 10841 - RNA, 68 nt, synthetic construct
  source 1..68: mol_type = other RNA
aaataaataaataaataataaataaataaataaataaatataaataaataaataaataaataaatata

SEQ ID NO: 10842 - RNA, 68 nt, synthetic construct
  source 1..68: mol_type = other RNA
aaaaaaaaaaaaaaaaaaaaaaaaaaaaaaaaaaaaaaaaaaaaaaaaaaaaatataaataaatataa

SEQ ID NO: 10843 - RNA, 68 nt, synthetic construct
  source 1..68: mol_type = other RNA
aaaaaaaaaaaaaaaaaaaaaaaaaaaaaaaaaaaaaaaaaaaaaaaaaaaaatataaatataaataa

SEQ ID NO: 10844 - RNA, 68 nt, synthetic construct
  source 1..68: mol_type = other RNA
aaaaaaaaaaaaaaaaaaaaaaaaaaaaaaaaaaaaaaaaaaaaaaaaataaatataaatataaataa

SEQ ID NO: 10845 - RNA, 68 nt, synthetic construct
  source 1..68: mol_type = other RNA
aaaaaaaaaaaaaaaaaaaaaaaaaaaaaaaaaaaaaaaaaaaaaaaaataaatataaataaatataa

SEQ ID NO: 10846 - RNA, 68 nt, synthetic construct
  source 1..68: mol_type = other RNA
aaaaaaaaaaaaaaaaaaaaaaaaaaaaaaaaaaaaaatataaataaataaatatataaataaatata

SEQ ID NO: 10847 - RNA, 68 nt, synthetic construct
  source 1..68: mol_type = other RNA
aaaaaaaaaaaaaaaaaaaaaaaaaaaaaaaaaaaaaatataaataaatatataaataaataaatata

SEQ ID NO: 10848 - RNA, 68 nt, synthetic construct
  source 1..68: mol_type = other RNA
aaaaaaaaaaaaaaaaaaaaaaaaaaaaaaaaaaaaaaaaaaaaataaataaatataaataaatataa

SEQ ID NO: 10849 - RNA, 68 nt, synthetic construct
  source 1..68: mol_type = other RNA
aaaaaaaaaaaaaaaaaaaaaaaaaaaaaaaaaaaaaaaaaaaaataaataaatataaatataaataa

SEQ ID NO: 10850 - RNA, 68 nt, synthetic construct
  source 1..68: mol_type = other RNA
aaataaataaaaaaaaaaaaaaaataaataaataaataaataaataaataaatataaatataaatata

SEQ ID NO: 10851 - RNA, 68 nt, synthetic construct
  source 1..68: mol_type = other RNA
aaataaatataaaaaaaaaaaataaataaataaataaatataaataaataaataaataaataaatata

SEQ ID NO: 10852 - RNA, 68 nt, synthetic construct
  source 1..68: mol_type = other RNA
aaataaataaaaaaaaaaaataaataaataaataaataaataaataaataaatataaatataaatata

SEQ ID NO: 10853 - RNA, 68 nt, synthetic construct
  source 1..68: mol_type = other RNA
aaataaataaataaaatataaataaataaataaataaatataaataaataaataaataaataaatata

SEQ ID NO: 10854 - RNA, 68 nt, synthetic construct
  source 1..68: mol_type = other RNA
aaataaaaaaaaaaaaaaaaaaaaaaaaaaaaaaaaaaaaaaaaaaaaaaaaaaaaaaaaaatataaa

SEQ ID NO: 10855 - RNA, 68 nt, synthetic construct
  source 1..68: mol_type = other RNA
aaataaaaaaaaaaaaaaaaaaaaaaaaaaaaaaaaaaaaaaaaaaaaaaaaaaaaaataaatataaa

SEQ ID NO: 10856 - RNA, 68 nt, synthetic construct
  source 1..68: mol_type = other RNA
aaataaataaaaaaaaaaaaaaaaaaaaaaaaaaaaaaaaaaaaaaaaaaaaaaaaaataaatataaa

SEQ ID NO: 10857 - RNA, 68 nt, synthetic construct
  source 1..68: mol_type = other RNA
aaataaataaataaataaatataaataaataaataaaaaaaaaaaaaaaaaaaaaaataaataaataa

SEQ ID NO: 10858 - RNA, 68 nt, synthetic construct
  source 1..68: mol_type = other RNA
aaataaataaataaataaatataaataaataaataaaaaaaaaaaaaaaaaaataaataaataaataa

SEQ ID NO: 10859 - RNA, 68 nt, synthetic construct
  source 1..68: mol_type = other RNA
aaaaaaaaaaaaaaaaaaaaaaaaaaaaaaaaaaaaaaaaaaaaaaatataaaaaaaaaaaaaatata

SEQ ID NO: 10860 - RNA, 68 nt, synthetic construct
  source 1..68: mol_type = other RNA
aaaaaaaaaaaaaaaaaaaaaaaaaaaaaaaaaaaaataaatataaaaaaaaaaaaaaaaaaaatata

SEQ ID NO: 10861 - RNA, 68 nt, synthetic construct
  source 1..68: mol_type = other RNA
aaaaaaataaaaaaaaaaaaaaaaaaaaaaaaaaaaaaaaaaaaaaaaaaaaaaaaaatataaatata

SEQ ID NO: 10862 - RNA, 68 nt, synthetic construct
  source 1..68: mol_type = other RNA
aaaaaaaaaaaaatataaaaaaaaaaaaaaaaaaaaaaaaaaaaaaaaaaaaaaaaaaaataaatata

SEQ ID NO: 10863 - RNA, 68 nt, synthetic construct
  source 1..68: mol_type = other RNA
aaaaaaataaaaaaaaaaaaaaaaaaaaaaaaaaaaaaaaaaaaaaaaaaaaaatataaataaatata

SEQ ID NO: 10864 - RNA, 68 nt, synthetic construct
  source 1..68: mol_type = other RNA
aaaaatataaaaaaaaaaaaaaaaaaaaaaaaaaaaaaaaaaaaaaaaaaaaaaaataaataaatata

SEQ ID NO: 10865 - RNA, 68 nt, synthetic construct
  source 1..68: mol_type = other RNA
aaaaaaataaaaaaaaaaaaaaaaaaaaaaaaaaaaaaaaaaaaaaaaaaaaaataaatataaatata

SEQ ID NO: 10866 - RNA, 68 nt, synthetic construct
  source 1..68: mol_type = other RNA
aaaaaaaaaaaaaaaaaaaaaaaaaaaaaaataaatataaataaaaaaaaaaaaaaaaaaaaaatata

SEQ ID NO: 10867 - RNA, 68 nt, synthetic construct
  source 1..68: mol_type = other RNA
aaaaaaaaataaataaaaaaaaaaaaaaaaaaaaaaaaaaaaaaaaaaaaaaaaaaaatataaatata

SEQ ID NO: 10868 - RNA, 68 nt, synthetic construct
  source 1..68: mol_type = other RNA
aaaaaaaaaaaaaaaaaaaaaaaaaaaaaaaaaaaaaatataaataaataaataaataaataaataat

SEQ ID NO: 10869 - RNA, 68 nt, synthetic construct
  source 1..68: mol_type = other RNA
aaaaaaaaaaaaaaaaaatataaataaataaataaaaaaaaaaaaaaaaaaaaaaaaaaaaaaatata

SEQ ID NO: 10870 - RNA, 68 nt, synthetic construct
  source 1..68: mol_type = other RNA
aaaaaaataaaaaaaaaaaaaaaaaaaaaaaaaaaaaaaaaaaaaaaaaataaatataaataaatata

SEQ ID NO: 10871 - RNA, 68 nt, synthetic construct
  source 1..68: mol_type = other RNA
aaaaaaataaaaaaaaaaaaaaaaaaaaaaaaaaaaaaaaaaaaaaaaaataaataaatataaatata

SEQ ID NO: 10872 - RNA, 68 nt, synthetic construct
  source 1..68: mol_type = other RNA
aaaaaaataaataaaaaaaaaaaaaaaaaaaaaaaaaaaaaaaaaaaaaaaaaatataaataaatata

SEQ ID NO: 10873 - RNA, 68 nt, synthetic construct
  source 1..68: mol_type = other RNA
aaaaaaaaaaaaaaaaaaaaaaaaaaaaaaataaatataaataaaaaaaaaaaaaaaaaataaatata

SEQ ID NO: 10874 - RNA, 68 nt, synthetic construct
  source 1..68: mol_type = other RNA
aaaaaaaaaaaaaaaaaaaaaaaaaaaaaaataaatataaataaataaaaaaaaaaaaaaaaaatata

SEQ ID NO: 10875 - RNA, 68 nt, synthetic construct
  source 1..68: mol_type = other RNA
aaaaaaaaaaaaaaaaaaaaaaaaaaataaataaatataaataaaaaaaaaaaaaaaaaaaaaatata

SEQ ID NO: 10876 - RNA, 68 nt, synthetic construct
  source 1..68: mol_type = other RNA
aaaaaaataaataaaaaaaaaaaaaaaaaaaaaaaaaaaaaaaaaaaaaataaatataaataaatata

SEQ ID NO: 10877 - RNA, 68 nt, synthetic construct
  source 1..68: mol_type = other RNA
aaaaaaaaaaaaaaaaaaaaaaaaaaaaaaataaatataaataaaaaaaaaaaaaataaataaatata

SEQ ID NO: 10878 - RNA, 68 nt, synthetic construct
  source 1..68: mol_type = other RNA
aaaaaaaaaaaaaaaaaaaaaaaaaaaaaaataaatataaataaataaataaaaaaaaaaaaaatata

SEQ ID NO: 10879 - RNA, 68 nt, synthetic construct
  source 1..68: mol_type = other RNA
aaaaaaaaaaaaaaaaaaaaaaaaaaaaaaataaatataaataaataaaaaaaaaaaaaataaatata

SEQ ID NO: 10880 - RNA, 68 nt, synthetic construct
  source 1..68: mol_type = other RNA
aaaaaaaaaaaaaaaaaaaaaaaaaaataaataaatataaataaataaaaaaaaaaaaaaaaaatata

SEQ ID NO: 10881 - RNA, 68 nt, synthetic construct
  source 1..68: mol_type = other RNA
aaaaaaaaaaaaaaaaaaaaaaataaataaataaatataaataaaaaaaaaaaaaaaaaaaaaatata

SEQ ID NO: 10882 - RNA, 68 nt, synthetic construct
  source 1..68: mol_type = other RNA
aaaaaaaaaaaaaaaaaaaaaaaaaaataaataaatataaataaaaaaaaaaaaaaaaaataaatata

SEQ ID NO: 10883 - RNA, 68 nt, synthetic construct
  source 1..68: mol_type = other RNA
aaaaaaaaaaaaaaaaaaaaaaaaaaaaaaaaaaaaaatataaataaataaataaaaaaataaatata

SEQ ID NO: 10884 - RNA, 68 nt, synthetic construct
  source 1..68: mol_type = other RNA
aaaaaaaaaaaaaaaaaaaaaaaaaaaaaaaaaaaaaatataaaaaaataaataaataaataaatata

SEQ ID NO: 10885 - RNA, 68 nt, synthetic construct
  source 1..68: mol_type = other RNA
aaaaaaaaaaaaaaaaaaaaaaaaaaaaaaaaaaaaaatataaataaataaataaataaaaaaatata

SEQ ID NO: 10886 - RNA, 68 nt, synthetic construct
  source 1..68: mol_type = other RNA
aaaaaaaaaaaaaaaataaaaaaaaaaaaaaaaaaaaaaaaatataaataaataaataaataaatata

SEQ ID NO: 10887 - RNA, 68 nt, synthetic construct
  source 1..68: mol_type = other RNA
aaaaaaaaaaaaaatataaaaaaaaaaaaaaaaaaaaaaaaaaataaataaataaataaataaatata

SEQ ID NO: 10888 - RNA, 68 nt, synthetic construct
  source 1..68: mol_type = other RNA
aaaaaaaaaaaaaaaaaaaaaaaaaaataaataaatataaataaaaaaaaaaaaaataaataaatata

SEQ ID NO: 10889 - RNA, 68 nt, synthetic construct
  source 1..68: mol_type = other RNA
aaaaaaaaaaaaaaaaaaaaaaaaaaaaaaataaatataaataaataaaaaaaaaataaataaatata

SEQ ID NO: 10890 - RNA, 68 nt, synthetic construct
  source 1..68: mol_type = other RNA
aaaaaaaaaaaaaaaaaaaaaaaaaaataaataaatataaataaataaaaaaaaaaaaaataaatata

SEQ ID NO: 10891 - RNA, 68 nt, synthetic construct
  source 1..68: mol_type = other RNA
aaaaaaaaaaaaaaaaaaaaaaaaaaaaaaataaatataaataaataaataaaaaaaaaataaatata

SEQ ID NO: 10892 - RNA, 68 nt, synthetic construct
  source 1..68: mol_type = other RNA
aaaaaaaaaaaaaaaaaaaaaaaaaaataaataaatataaataaataaataaaaaaaaaaaaaatata

SEQ ID NO: 10893 - RNA, 68 nt, synthetic construct
  source 1..68: mol_type = other RNA
aaaaaaaaaaaaaaaaaaaaaaataaataaataaatataaataaaaaaaaaaaaaaaaaataaatata

SEQ ID NO: 10894 - RNA, 68 nt, synthetic construct
  source 1..68: mol_type = other RNA
aaaaaaaaaaaaaaaaaaaaaaataaataaataaatataaataaataaaaaaaaaaaaaaaaaatata

SEQ ID NO: 10895 - RNA, 68 nt, synthetic construct
  source 1..68: mol_type = other RNA
aaataaaaaaaaaaaaaaaaaaaaaaaaaaaaaaaaaaaaaaaaaaataaaaaaaaaaaaaaaatata

SEQ ID NO: 10896 - RNA, 68 nt, synthetic construct
  source 1..68: mol_type = other RNA
aaaaaaaaaaaaaaaaaaaaaaataaataaataaatataaataaaaaaaaaaaaaataaataaatata

SEQ ID NO: 10897 - RNA, 68 nt, synthetic construct
  source 1..68: mol_type = other RNA
aaaaaaaaaaaaaaaaaaaaaaaaaaaaaaataaatataaataaataaataaaaaataaataaatata

SEQ ID NO: 10898 - RNA, 68 nt, synthetic construct
  source 1..68: mol_type = other RNA
aaaaaaaaaaaaaaaaaaaaaaaaaaataaataaatataaataaataaaaaaaaaataaataaatata

SEQ ID NO: 10899 - RNA, 68 nt, synthetic construct
  source 1..68: mol_type = other RNA
aaaaaaaaaaaaaaaaaaaaaaataaataaataaatataaataaataaataaaaaaaaaaaaaatata

SEQ ID NO: 10900 - RNA, 68 nt, synthetic construct
  source 1..68: mol_type = other RNA
aaaaaaaaaaaaaaaaaaaaaaataaataaataaatataaataaataaaaaaaaaaaaaataaatata

SEQ ID NO: 10901 - RNA, 68 nt, synthetic construct
  source 1..68: mol_type = other RNA
aaaaaaaaaaaaaaaaaaaaaaaaaaataaataaatataaataaataaataaaaaaaaaataaatata

SEQ ID NO: 10902 - RNA, 68 nt, synthetic construct
  source 1..68: mol_type = other RNA
aaaaaaaataaaaaaaaaaaaaaaaaaaaaaaaaaaaatataaataaataaataaataaataaatata

SEQ ID NO: 10903 - RNA, 68 nt, synthetic construct
  source 1..68: mol_type = other RNA
aaaaaaaaaaaaaaaaaaaaaaaataaaaaaaaaaaaatataaataaataaataaataaataaatata

SEQ ID NO: 10904 - RNA, 68 nt, synthetic construct
  source 1..68: mol_type = other RNA
aaaaaaaaaaaaaaaaaaaaaaaaaaaaaaaataaaaatataaataaataaataaataaataaatata

SEQ ID NO: 10905 - RNA, 68 nt, synthetic construct
  source 1..68: mol_type = other RNA
aaaaaaaaaaaaaaaaataaaaaaaaaaaaaaaaaaaatataaataaataaataaataaataaatata

SEQ ID NO: 10906 - RNA, 68 nt, synthetic construct
  source 1..68: mol_type = other RNA
aaaaaaaaaataaaaaaaaaaaaaaaaaaaaaaaaaaatataaataaataaataaataaataaatata

SEQ ID NO: 10907 - RNA, 68 nt, synthetic construct
  source 1..68: mol_type = other RNA
aaaataaaaaaaaaaaaaaaaaaaaaaaaaaaaaaaaatataaataaataaataaataaataaatata

SEQ ID NO: 10908 - RNA, 68 nt, synthetic construct
  source 1..68: mol_type = other RNA
aaaaaaaaaaaaataaaaaaaaaaaaaaaaaaaaaaaatataaataaataaataaataaataaatata

SEQ ID NO: 10909 - RNA, 68 nt, synthetic construct
  source 1..68: mol_type = other RNA
aaaaaaaaaaaaaaaataaaaaaaaaaaaaaaaaaaaatataaataaataaataaataaataaatata

SEQ ID NO: 10910 - RNA, 68 nt, synthetic construct
  source 1..68: mol_type = other RNA
aaaaaaaaaaaaaaaaaaaaaaaaaaaaaataaaaaaatataaataaataaataaataaataaatata

SEQ ID NO: 10911 - RNA, 68 nt, synthetic construct
  source 1..68: mol_type = other RNA
aaataaataaaaaaaaaaaaaaaaaaaaaaaaaaaaaaaaaaaaaaataaaaaaaaaaaaaaaatata

SEQ ID NO: 10912 - RNA, 68 nt, synthetic construct
  source 1..68: mol_type = other RNA
aaataaaaaaaaaaataaaaaaaaaaaaaaaaaaaaaaaaaaaaaaaaaaaaaaaaaaaataaatata

SEQ ID NO: 10913 - RNA, 69 nt, synthetic construct
  source 1..69: mol_type = other RNA
aaaaaaaaaaaaaaaaaaaaaaaaaaaaaaaaaaaaaaaaaaaaaaaaaaaaaaaaaaaaataaatata

SEQ ID NO: 10914 - RNA, 69 nt, synthetic construct
  source 1..69: mol_type = other RNA
aaaaaaaaaaaaaaaaaaaaaaaaaaaaaaaaaaaaaaaaaaaaaaaaaaaaaaaaaaaaataaataaa

SEQ ID NO: 10915 - RNA, 69 nt, synthetic construct
  source 1..69: mol_type = other RNA
aaaaaaaaaaaaaaaaaaaaaaaaaaaaaaaaaaaaaaaaaaaaaaaaaaaaaaaaaaaaaataaatat

SEQ ID NO: 10916 - RNA, 69 nt, synthetic construct
  source 1..69: mol_type = other RNA
aaaaaaaaaaaaaaaaaaaaaaaaaaaaaaaaaaaaaaaaaaaaaaaaaaaaaaaaaataaataaatat

SEQ ID NO: 10917 - RNA, 69 nt, synthetic construct
  source 1..69: mol_type = other RNA
aaaaaaaaaaaaaaaaaaaaaaaaaaaaaaaaaaaaataaataaataaataaatataaatataaatata

SEQ ID NO: 10918 - RNA, 69 nt, synthetic construct
  source 1..69: mol_type = other RNA
aaaaaaaaaaaaaaaaatataaataaataaatataaataaataaataaataaataaataaataaatata

SEQ ID NO: 10919 - RNA, 69 nt, synthetic construct
  source 1..69: mol_type = other RNA
aaaaaaaaaaaaataaatataaataaataaatataaataaataaataaataaataaataaataaatata

SEQ ID NO: 10920 - RNA, 69 nt, synthetic construct
  source 1..69: mol_type = other RNA
aaaaaaaaaaaaaaaaaaaaataaataaataaataaataaataaataaataaatataaataaatatata

SEQ ID NO: 10921 - RNA, 69 nt, synthetic construct
  source 1..69: mol_type = other RNA
aaataaataaataaataaataaataaaaaaaaaaaaaaaaaaaaaaaaaaaaaaaaaaaaaataaataa

SEQ ID NO: 10922 - RNA, 69 nt, synthetic construct
  source 1..69: mol_type = other RNA
aaataaataaataaataaataaataaaaaaaaaaaaaaaaaaaaaaaaaaaaaaaaaataaataaataa

SEQ ID NO: 10923 - RNA, 69 nt, synthetic construct
  source 1..69: mol_type = other RNA
aaataaataaataaataaataaataaataaaaaaaaaaaaaaaaaaaaaaaaaaaaaaaaaataaataa

SEQ ID NO: 10924 - RNA, 69 nt, synthetic construct
  source 1..69: mol_type = other RNA
aaataaataaataaataaataaataaataaaaaaaaaaaaaaaaaaaaaaaaaaaaaataaataaataa

SEQ ID NO: 10925 - RNA, 69 nt, synthetic construct
  source 1..69: mol_type = other RNA
aaataaaaaaaaaaaaaaaaaaaaaaaaaaaaaaaaaaaaaaaaaaaaaaaaaaaaaaaaaataaatat

SEQ ID NO: 10926 - RNA, 69 nt, synthetic construct
  source 1..69: mol_type = other RNA
aaaaaaaaaaaaataaaaaaaaaaaaaaaaaaaaaaaaaaaaaaaaaaaaaaaaaaaaaaataaatata

SEQ ID NO: 10927 - RNA, 69 nt, synthetic construct
  source 1..69: mol_type = other RNA
aaaaaaaaaaaaaaaaaaaaaaaaaaaaaaaaaataaaaaaaaaaaaaaaaaaaaaaaaaataaatata

SEQ ID NO: 10928 - RNA, 69 nt, synthetic construct
  source 1..69: mol_type = other RNA
aaaaaaaaaaaaaaaaaaaaaaaaaaaaaaaaaaaaaaaaaaataaaaaaaaaaaaaaaaataaatata

SEQ ID NO: 10929 - RNA, 69 nt, synthetic construct
  source 1..69: mol_type = other RNA
aaaaaaaaaaaaaaaaataaaaaaaaaaaaaaaaaaaaaaaaaaaaaaaaaaaaaaaaaaataaatata

SEQ ID NO: 10930 - RNA, 69 nt, synthetic construct
  source 1..69: mol_type = other RNA
aaaaaaaaaaaaaaaaaaaaaaaaaaaaaaaaaaaaaaaaaaaaaaaaaaaaaaaataaaataaatata

SEQ ID NO: 10931 - RNA, 69 nt, synthetic construct
  source 1..69: mol_type = other RNA
aaaaaaaaaaaaataaataaaaaaaaaaaaaaaaaaaaaaaaaaaaaaaaaaaaaaaaaaataaatata

SEQ ID NO: 10932 - RNA, 69 nt, synthetic construct
  source 1..69: mol_type = other RNA
aaaaaaaaaaaaataaataaaaaaaaaaaaaaaaaaaaaaaaaaaaaaaaaaaaaaataaataaatata

SEQ ID NO: 10933 - RNA, 69 nt, synthetic construct
  source 1..69: mol_type = other RNA
aaaaaaaaaaaaaaaaaaaaaaaaaaaaaaaaaaaaaaaaaaaaaaaaaaaaaataaatataaatataa

SEQ ID NO: 10934 - RNA, 69 nt, synthetic construct
  source 1..69: mol_type = other RNA
aaataaataaataaataaataaataaataaaaaaaaaaaaaaaaaaaaaaaaaaaaaaaaaaaaaaata

SEQ ID NO: 10935 - RNA, 69 nt, synthetic construct
  source 1..69: mol_type = other RNA
aaaaaaaaaaaaaaatatataaataaataaatataaataaataaataaataaataaataaataaatata

SEQ ID NO: 10936 - RNA, 69 nt, synthetic construct
  source 1..69: mol_type = other RNA
aaataaataaataaataaataaatataaaaaaaaaaaaaaaaaaaaaaaaaaaaaaaataaataaataa

SEQ ID NO: 10937 - RNA, 69 nt, synthetic construct
  source 1..69: mol_type = other RNA
aaaaaaaaaaaaaaaaaaaaataaataaataaataaataaataaataaataaatataaataaatataaa

SEQ ID NO: 10938 - RNA, 69 nt, synthetic construct
  source 1..69: mol_type = other RNA
aaataaataaataaataaataaatataaataaaaaaaaaaaaaaaaaaaaaaaaaaaataaataaataa

SEQ ID NO: 10939 - RNA, 69 nt, synthetic construct
  source 1..69: mol_type = other RNA
aaaaaaaaaaaaaaaaatataaataaataaatataaataaataaataaataaataaataaataaataaa

SEQ ID NO: 10940 - RNA, 69 nt, synthetic construct
  source 1..69: mol_type = other RNA
aaaaaaaaaaaaaaataaaaaaaaaaaaaaaaaaaaaaaaaaaaaaaaaaaaaaaaaaatataaatata

SEQ ID NO: 10941 - RNA, 69 nt, synthetic construct
  source 1..69: mol_type = other RNA
aaaaaaaaaaaaaaataaataaaaaaaaaaaaaaaaaaaaaaaaaaaaaaaaaaaaaaatataaatata

SEQ ID NO: 10942 - RNA, 69 nt, synthetic construct
  source 1..69: mol_type = other RNA
aaaaaaaaaaaaaaataaaaaaaaaaaaaaaaaaaaaaaaaaaaaaaaaaaaaaataaatataaatata

SEQ ID NO: 10943 - RNA, 69 nt, synthetic construct
  source 1..69: mol_type = other RNA
aaaaaaaaaaaaaaataaataaaaaaaaaaaaaaaaaaaaaaaaaaaaaaaaaaataaatataaatata

SEQ ID NO: 10944 - RNA, 69 nt, synthetic construct
  source 1..69: mol_type = other RNA
aaaaaaaaaaaaaaaaaaaaaaaaaaaaaaaaaaaaaatataaataaataaataaataaaaaaaatata

SEQ ID NO: 10945 - RNA, 69 nt, synthetic construct
  source 1..69: mol_type = other RNA
aaaaaaaaaaaaaaaaaaaaaaaaaaaaaaaaaaaataaatataaataaataaataaaaaaaaaatata

SEQ ID NO: 10946 - RNA, 69 nt, synthetic construct
  source 1..69: mol_type = other RNA
aaaaaaaaaaaaaaaaaaaaaaaaaaaaaaaaaaaaaatataaataaataaataaataaataaaatata

SEQ ID NO: 10947 - RNA, 69 nt, synthetic construct
  source 1..69: mol_type = other RNA
aaaaaaaaaaaaaaaaaaaaaaaaaaaaaaaaaaaaataaataaataaataaatataaaaataaatata

SEQ ID NO: 10948 - RNA, 69 nt, synthetic construct
  source 1..69: mol_type = other RNA
aaaaaaaaaaaaaaaataaataaaaaaaaaaaaaaaaaaaaaataaatataaataaataaataaatata

SEQ ID NO: 10949 - RNA, 69 nt, synthetic construct
  source 1..69: mol_type = other RNA
aaataaaaaaaaataaaaaaaaaaaaaaaaaaaaaaaaaaaaaaaaaaaaaaaaaaaaaaataaatata

SEQ ID NO: 10950 - RNA, 69 nt, synthetic construct
  source 1..69: mol_type = other RNA
aaaaaaaaaaaaaaaataaataaataaaaaaaaaaaaaaaaaataaatataaataaataaataaatata

SEQ ID NO: 10951 - RNA, 69 nt, synthetic construct
  source 1..69: mol_type = other RNA
aaataaaaaaaaaaaaaaaaaaaaaaaaaaaaaaaaaaaaaaaaaaaaaataaataaataaaaaatata

SEQ ID NO: 10952 - RNA, 69 nt, synthetic construct
  source 1..69: mol_type = other RNA
aaataaataaaaaaaaaaaaaaaaaaaaaaaaaaaaaaaaaaaaaaaaaataaataaataaaaaatata

SEQ ID NO: 10953 - RNA, 69 nt, synthetic construct
  source 1..69: mol_type = other RNA
aaaaaaaaaaaaaaaaaaaaaaaaaaaaaaaaaaaaaaaaaaaaaaaaaaaaaaaaaaaaaatatatat

SEQ ID NO: 10954 - RNA, 69 nt, synthetic construct
  source 1..69: mol_type = other RNA
aaataaataaataaaaaaaaaaaaaaaaaaaaaaaaaaaaaaaaaaaaaataaataaataaaaaatata

SEQ ID NO: 10955 - RNA, 69 nt, synthetic construct
  source 1..69: mol_type = other RNA
aaataaataaaaaaaaaaaaaaaaataaataaataaataaaaaaaaaaaaaaaaaaaaaaaaaaatata

SEQ ID NO: 10956 - RNA, 69 nt, synthetic construct
  source 1..69: mol_type = other RNA
aaataaataaataaataaaaaaaaaaaaaaaaaaaaaaaaaaaaaaaaaataaataaataaaaaatata

SEQ ID NO: 10957 - RNA, 69 nt, synthetic construct
  source 1..69: mol_type = other RNA
aaaataaataaataaataaaaaaaaaataaataaatataaataaataaataaataaataaataaatata

SEQ ID NO: 10958 - RNA, 69 nt, synthetic construct
  source 1..69: mol_type = other RNA
aaaataaataaataaataaaaaaaaaataaatataaataaataaataaataaataaataaataaatata

SEQ ID NO: 10959 - RNA, 69 nt, synthetic construct
  source 1..69: mol_type = other RNA
aaaataaataaataaataaaaaataaataaatataaataaataaataaataaataaataaataaatata

SEQ ID NO: 10960 - RNA, 69 nt, synthetic construct
  source 1..69: mol_type = other RNA
aaaataaataaataaataaataaaaaataaataaatataaataaataaataaataaataaataaatata

SEQ ID NO: 10961 - RNA, 69 nt, synthetic construct
  source 1..69: mol_type = other RNA
aaaataaataaataaataaaaaataaataaataaatataaataaataaataaataaataaataaatata

SEQ ID NO: 10962 - RNA, 69 nt, synthetic construct
  source 1..69: mol_type = other RNA
aaaataaataaataaataaataaaaaataaatataaataaataaataaataaataaataaataaatata

SEQ ID NO: 10963 - RNA, 69 nt, synthetic construct
  source 1..69: mol_type = other RNA
aaaaaaaaaaaaataaaaaaaaaaaaaaaaaaaaaaaaaaaaaaaaaaaaaaaaaaaaaaataaataaa

SEQ ID NO: 10964 - RNA, 69 nt, synthetic construct
  source 1..69: mol_type = other RNA
aaaaaaaaaaaaaaaaaaaaaaaaaaaaaaaaaaaaaaaaaaaaaaaaaaataaaaaaaaataaataaa

SEQ ID NO: 10965 - RNA, 69 nt, synthetic construct
  source 1..69: mol_type = other RNA
aaaaaaaaaaataaaaaaaaaaaaaaaaaaaaaaaaaaaaaaaaaaaaaaaaaaaaaaaaataaataaa

SEQ ID NO: 10966 - RNA, 69 nt, synthetic construct
  source 1..69: mol_type = other RNA
aaaaaaaaaaaaaaaaaaaaaaaaaataaaaaaaaaaaaaaaaaaaaaaaaaaaaaaaaaataaataaa

SEQ ID NO: 10967 - RNA, 69 nt, synthetic construct
  source 1..69: mol_type = other RNA
aaaaaaaaaaaaaaaaaaaaaaaaaaaaaaaaaaaaaaaaaaaaaaaaaaaaaataaaaaataaataaa

SEQ ID NO: 10968 - RNA, 69 nt, synthetic construct
  source 1..69: mol_type = other RNA
aaaaaaaaaaaaaaaaaaaaaaaataaaaaaaaaaaaaaaaaaaaaaaaaaaaaaaaaaaataaataaa

SEQ ID NO: 10969 - RNA, 69 nt, synthetic construct
  source 1..69: mol_type = other RNA
aaaaaaaaaaaaaaaataaaaaaaaaaaaaaaaaaaaaaaaaaaaaaaaaaaaaaaaaaaataaataaa

SEQ ID NO: 10970 - RNA, 69 nt, synthetic construct
  source 1..69: mol_type = other RNA
aaaaaaaaaaaaaaaaaaaataaaaaaaaaaaaaaaaaaaaaaaaaaaaaaaaaaaaaaaataaataaa

SEQ ID NO: 10971 - RNA, 69 nt, synthetic construct
  source 1..69: mol_type = other RNA
aaaaaaaataaaaaaaaaaaaaaaaaaaaaaaaaaaaaaaaaaaaaaaaaaaaaaaaaaaataaataaa

SEQ ID NO: 10972 - RNA, 69 nt, synthetic construct
  source 1..69: mol_type = other RNA
aaaataaaaaaaaaaaaaaaaaaaaaaaaaaaaaaaaaaaaaaaaaaaaaaaaaaaaaaaataaataaa

SEQ ID NO: 10973 - RNA, 69 nt, synthetic construct
  source 1..69: mol_type = other RNA
aaaaaaaaaaataaataaataaataaaaaaaaaaaaaaaaaaaaaaaaaaaaaaaaaaaaaataaataa

SEQ ID NO: 10974 - RNA, 69 nt, synthetic construct
  source 1..69: mol_type = other RNA
aaaaaaaaaaaaaaaaaaaaataaataaataaataaataaataaaaaaaaaaaaaaaaataaatatata

SEQ ID NO: 10975 - RNA, 69 nt, synthetic construct
  source 1..69: mol_type = other RNA
aaaaaaaaataaataaaaaaaaaaaaaaaaaaaaaaaaaaaaaaaaaaaaaaaaaaaaaaataaataaa

SEQ ID NO: 10976 - RNA, 69 nt, synthetic construct
  source 1..69: mol_type = other RNA
aaaaaaaaaaaaataaataaaaaaaaaaaaaaaaaaaaaaaaaaaaaaaaaaaaaaaaaaataaataaa

SEQ ID NO: 10977 - RNA, 69 nt, synthetic construct
  source 1..69: mol_type = other RNA
aaaaaaaaaaaaataaaaaaaaaaaaaaaaaaaaaaaaaaaaaaaaaaaaaaaaaaataaataaataaa

SEQ ID NO: 10978 - RNA, 69 nt, synthetic construct
  source 1..69: mol_type = other RNA
aaaaaaaaaaataaataaataaataaaaaaaaaaaaaaaaaaaaaaaaaaaaaaaaaataaataaataa

SEQ ID NO: 10979 - RNA, 69 nt, synthetic construct
  source 1..69: mol_type = other RNA
aaaaaaaaaaataaataaataaataaataaaaaaaaaaaaaaaaaaaaaaaaaaaaaaaaaataaataa

SEQ ID NO: 10980 - RNA, 69 nt, synthetic construct
  source 1..69: mol_type = other RNA
aaaaaaataaataaataaataaataaaaaaaaaaaaaaaaaaaaaaaaaaaaaaaaaaaaaataaataa

SEQ ID NO: 10981 - RNA, 69 nt, synthetic construct
  source 1..69: mol_type = other RNA
aaaaaaaaaaaaaaaaaaaaataaataaataaataaataaataaataaaaaaaaaaaaataaatatata

SEQ ID NO: 10982 - RNA, 69 nt, synthetic construct
  source 1..69: mol_type = other RNA
aaaaaaaaaaaaaaaaaaaaataaataaataaataaataaataaaaaaaaaaaaataaataaatatata

SEQ ID NO: 10983 - RNA, 69 nt, synthetic construct
  source 1..69: mol_type = other RNA
aaaaaaaaataaataaataaaaaaaaaaaaaaaaaaaaaaaaaaaaaaaaaaaaaaaaaaataaataaa

SEQ ID NO: 10984 - RNA, 69 nt, synthetic construct
  source 1..69: mol_type = other RNA
aaaaaaaaaaaaataaataaaaaaaaaaaaaaaaaaaaaaaaaaaaaaaaaaaaaaataaataaataaa

SEQ ID NO: 10985 - RNA, 69 nt, synthetic construct
  source 1..69: mol_type = other RNA
aaaaaaaaataaataaaaaaaaaaaaaaaaaaaaaaaaaaaaaaaaaaaaaaaaaaataaataaataaa

SEQ ID NO: 10986 - RNA, 69 nt, synthetic construct
  source 1..69: mol_type = other RNA
aaaaaaaaaaaaataaataaataaaaaaaaaaaaaaaaaaaaaaaaaaaaaaaaaaaaaaataaataaa

SEQ ID NO: 10987 - RNA, 69 nt, synthetic construct
  source 1..69: mol_type = other RNA
aaaaaaaaaaataaataaataaataaataaaaaaaaaaaaaaaaaaaaaaaaaaaaaataaataaataa

SEQ ID NO: 10988 - RNA, 69 nt, synthetic construct
  source 1..69: mol_type = other RNA
aaaaaaataaataaataaataaataaaaaaaaaaaaaaaaaaaaaaaaaaaaaaaaaataaataaataa

SEQ ID NO: 10989 - RNA, 69 nt, synthetic construct
  source 1..69: mol_type = other RNA
aaaaaaaaaaaaaaaaaaaaataaataaataaataaataaataaataaataaaaaaaaataaatatata

SEQ ID NO: 10990 - RNA, 69 nt, synthetic construct
  source 1..69: mol_type = other RNA
aaaaaaaaaaaaaaaaaaaaataaataaataaataaataaataaataaaaaaaaataaataaatatata

SEQ ID NO: 10991 - RNA, 69 nt, synthetic construct
  source 1..69: mol_type = other RNA
aaataaatataaataaataaataaaaaaaaaaaaaaaaaaaaaaaaaaaaaaaaaaaaaaaaaaaaata

SEQ ID NO: 10992 - RNA, 69 nt, synthetic construct
  source 1..69: mol_type = other RNA
aaataaataaatataaataaataaaaaaaaaaaaaaaaaaaaaaaaaaaaaaaaaaaaaaaaaaaaata

SEQ ID NO: 10993 - RNA, 69 nt, synthetic construct
  source 1..69: mol_type = other RNA
aaaaaaaaataaataaataaaaaaaaaaaaaaaaaaaaaaaaaaaaaaaaaaaaaaataaataaataaa

SEQ ID NO: 10994 - RNA, 69 nt, synthetic construct
  source 1..69: mol_type = other RNA
aaaaaaaaaaaaataaataaataaataaaaaaaaaaaaaaaaaaaaaaaaaaaaaaaaaaataaataaa

SEQ ID NO: 10995 - RNA, 69 nt, synthetic construct
  source 1..69: mol_type = other RNA
aaaaaaaaataaataaataaataaaaaaaaaaaaaaaaaaaaaaaaaaaaaaaaaaaaaaataaataaa

SEQ ID NO: 10996 - RNA, 69 nt, synthetic construct
  source 1..69: mol_type = other RNA
aaaaaaataaataaataaataaataaataaaaaaaaaaaaaaaaaaaaaaaaaaaaaataaataaataa

SEQ ID NO: 10997 - RNA, 69 nt, synthetic construct
  source 1..69: mol_type = other RNA
aaaaaaaaaaaaaaaaaaaaataaataaataaataaataaataaataaataaataaaaataaatatata

SEQ ID NO: 10998 - RNA, 69 nt, synthetic construct
  source 1..69: mol_type = other RNA
aaataaatataaataaataaataaaaaaaaaaaaaaaaaaaaaaaaaaaaaaaaaaaaaaaaataaata

SEQ ID NO: 10999 - RNA, 69 nt, synthetic construct
  source 1..69: mol_type = other RNA
aaataaataaatataaataaataaaaaaaaaaaaaaaaaaaaaaaaaaaaaaaaaaaaaaaaataaata

SEQ ID NO: 11000 - RNA, 69 nt, synthetic construct
  source 1..69: mol_type = other RNA
aaaaaaaaataaataaataaataaataaaaaaaaaaaaaaaaaaaaaaaaaaaaaaaaaaataaataaa

SEQ ID NO: 11001 - RNA, 69 nt, synthetic construct
  source 1..69: mol_type = other RNA
aaaaaaaaaaaaataaataaataaataaaaaaaaaaaaaaaaaaaaaaaaaaaaaaataaataaataaa

SEQ ID NO: 11002 - RNA, 69 nt, synthetic construct
  source 1..69: mol_type = other RNA
aaaaaaaaaaaaaaaaaaaaaaaaaaaaaaaaaaaaaaaaaaaaaaaaaaaatataaatataaatataa

SEQ ID NO: 11003 - RNA, 69 nt, synthetic construct
  source 1..69: mol_type = other RNA
aaataaatataaataaataaataaaaaaaaaaaaaaaaaaaaaaaaaaaaaaaaaaaaataaataaata

SEQ ID NO: 11004 - RNA, 69 nt, synthetic construct
  source 1..69: mol_type = other RNA
aaaaaaaaaaaaaaaaaaaaaaaaaaaaaaaaaaaaaaaaaaaaaataaaaaaaaaaaaaaataaatat

SEQ ID NO: 11005 - RNA, 69 nt, synthetic construct
  source 1..69: mol_type = other RNA
aaaaaaaataaaaaaaaaaaaaaaaaaaaaaaaaaaaaaaaaaaaaaaaaaaaaaaaaaaaataaatat

SEQ ID NO: 11006 - RNA, 69 nt, synthetic construct
  source 1..69: mol_type = other RNA
aaaaaaaaaaaaaaaaaaaataaaaaaaaaaaaaaaaaaaaaaaaaaaaaaaaaaaaaaaaataaatat

SEQ ID NO: 11007 - RNA, 69 nt, synthetic construct
  source 1..69: mol_type = other RNA
aaaaaaaaaaaaaaaaaaaaaaaaaaaaaaaaaaaaaaaaaaaaaaaaaaaaaaataaaaaataaatat

SEQ ID NO: 11008 - RNA, 69 nt, synthetic construct
  source 1..69: mol_type = other RNA
aaaaaaaaaaaaaaaaaaaaaataaaaaaaaaaaaaaaaaaaaaaaaaaaaaaaaaaaaaaataaatat

SEQ ID NO: 11009 - RNA, 69 nt, synthetic construct
  source 1..69: mol_type = other RNA
aaaaaaaaaaaaaaaaaaaaaaaaaaaaaaaaaaaaaaaaaaaaaataaataaaaaaaaaaataaatat

SEQ ID NO: 11010 - RNA, 69 nt, synthetic construct
  source 1..69: mol_type = other RNA
aaaaaaaaaaaaaaaaaaaaaaaaaaaaaaaaaaaaaaaaaataaataaaaaaaaaaaaaaataaatat

SEQ ID NO: 11011 - RNA, 69 nt, synthetic construct
  source 1..69: mol_type = other RNA
aaaaaaaaaaaaaaaaaaaaaaaaaaaaaaaaaaaaaaaaaaaaaataaataaataaaaaaataaatat

SEQ ID NO: 11012 - RNA, 69 nt, synthetic construct
  source 1..69: mol_type = other RNA
aaaaaaaaaaaaaaaaaaaaaaaaaaaaaaaaaaaaaaaaaataaataaataaaaaaaaaaataaatat

SEQ ID NO: 11013 - RNA, 70 nt, synthetic construct
  source 1..70: mol_type = other RNA
aaaaaaaaaaaaaaaaaaaaaaaaaaaaaataaataaataaatataaataaatataaataaataaatata

SEQ ID NO: 11014 - RNA, 70 nt, synthetic construct
  source 1..70: mol_type = other RNA
aaatataaataaataaataaaaaaaaaaaaaaaaaaaaaaaaaaaaaaaaaaaaaaaaaaaaaaaatata

SEQ ID NO: 11015 - RNA, 70 nt, synthetic construct
  source 1..70: mol_type = other RNA
aaaaaaaaaaaaaaaaaaaaaaaaaataaataaataaataaatataaataaatataaataaataaatata

SEQ ID NO: 11016 - RNA, 70 nt, synthetic construct
  source 1..70: mol_type = other RNA
aaaaaaaaaaaaaaaaaaaaaaaaaataaataaataaataaatataaatataaataaataaataaatata

SEQ ID NO: 11017 - RNA, 70 nt, synthetic construct
  source 1..70: mol_type = other RNA
aaatataaataaataaataaataaaaaaaaaaaaaaaaaaaaaaaaaaaaaaaaaaaaaaaaaaaatata

SEQ ID NO: 11018 - RNA, 70 nt, synthetic construct
  source 1..70: mol_type = other RNA
aaaaaaaaaaaaaaaaaaaaaataaataaataaataaataaatataaataaatataaataaataaatata

SEQ ID NO: 11019 - RNA, 70 nt, synthetic construct
  source 1..70: mol_type = other RNA
aaaaaaaaaaaaaaaaaaaaaataaataaataaataaataaatataaatataaataaataaataaatata

SEQ ID NO: 11020 - RNA, 70 nt, synthetic construct
  source 1..70: mol_type = other RNA
aaatataaataaataaataaataaataaaaaaaaaaaaaaaaaaaaaaaaaaaaaaaaaaaaaaaatata

SEQ ID NO: 11021 - RNA, 70 nt, synthetic construct
  source 1..70: mol_type = other RNA
aaaaaaaaaaaaaaaaaataaataaataaataaataaataaatataaatataaataaataaataaatata

SEQ ID NO: 11022 - RNA, 70 nt, synthetic construct
  source 1..70: mol_type = other RNA
aaaaaaaaaaaaaaaaaataaataaataaataaataaataaatataaataaatataaataaataaatata

SEQ ID NO: 11023 - RNA, 70 nt, synthetic construct
  source 1..70: mol_type = other RNA
aaaaaaaaaaaaaataaataaataaataaataaataaataaatataaataaatataaataaataaatata

SEQ ID NO: 11024 - RNA, 70 nt, synthetic construct
  source 1..70: mol_type = other RNA
aaaaaaaaaaaaaataaataaataaataaataaataaataaatataaatataaataaataaataaatata

SEQ ID NO: 11025 - RNA, 70 nt, synthetic construct
  source 1..70: mol_type = other RNA
aaaaaaaaaataaataaataaataaataaataaataaataaatataaatataaataaataaataaatata

SEQ ID NO: 11026 - RNA, 70 nt, synthetic construct
  source 1..70: mol_type = other RNA
aaaaaaaaaataaataaataaataaataaataaataaataaatataaataaatataaataaataaatata

SEQ ID NO: 11027 - RNA, 70 nt, synthetic construct
  source 1..70: mol_type = other RNA
aaatataaataaataaataaatataaaaaaaaaaaaaaaaaaaaaaaaaaaaaaaaaaaaaaaaaatata

SEQ ID NO: 11028 - RNA, 70 nt, synthetic construct
  source 1..70: mol_type = other RNA
aaaaaaaaaaaaaaaatataaataaataaataaataaataaatataaataaatataaataaataaatata

SEQ ID NO: 11029 - RNA, 70 nt, synthetic construct
  source 1..70: mol_type = other RNA
aaataaataaataaatataaataaataaaaaaaaaaaaaaaaaaaaaaaaaaaaaaaaaatataaatata

SEQ ID NO: 11030 - RNA, 70 nt, synthetic construct
  source 1..70: mol_type = other RNA
aaataaataaataaatataaataaataaataaaaaaaaaaaaaaaaaaaaaaaaaaaaaatataaatata

SEQ ID NO: 11031 - RNA, 70 nt, synthetic construct
  source 1..70: mol_type = other RNA
aaataaataaataaatataaataaataaaaaaaaaaaaaaaaaaaaaaaaaaaaaataaatataaatata

SEQ ID NO: 11032 - RNA, 70 nt, synthetic construct
  source 1..70: mol_type = other RNA
aaaaaaaatataaataaataaataaataaataaataaataaatataaataaatataaataaataaatata

SEQ ID NO: 11033 - RNA, 70 nt, synthetic construct
  source 1..70: mol_type = other RNA
aaaaaaaatataaataaataaataaataaataaataaataaatataaatataaataaataaataaatata

SEQ ID NO: 11034 - RNA, 70 nt, synthetic construct
  source 1..70: mol_type = other RNA
aaataaataaataaatataaataaataaataaaaaaaaaaaaaaaaaaaaaaaaaataaatataaatata

SEQ ID NO: 11035 - RNA, 70 nt, synthetic construct
  source 1..70: mol_type = other RNA
aaataaaaaaaaaaaaaataaataaataaataaataaataaatataaataaatataaataaataaatata

SEQ ID NO: 11036 - RNA, 70 nt, synthetic construct
  source 1..70: mol_type = other RNA
aaatataaataaataaataaaaaaaaaaaaaaaaaaaaaaaaaaaaaaaaaaaaaaaaaaaaaaaataaa

SEQ ID NO: 11037 - RNA, 70 nt, synthetic construct
  source 1..70: mol_type = other RNA
aaaaaaaaaaaaaaaaaaaaaaaaaataaataaataaataaatataaataaatataaataaataaataaa

SEQ ID NO: 11038 - RNA, 70 nt, synthetic construct
  source 1..70: mol_type = other RNA
aaaaaaaaaaaaaaaaaaaaaaaaaaaaaaaaaaaaaaaaaaatataaataaaaaaaaaaaaaaaatata

SEQ ID NO: 11039 - RNA, 70 nt, synthetic construct
  source 1..70: mol_type = other RNA
aaaaaaaaaaaaaaaaaaaaaaaaaaaaaaaaaaaaaaaaaaataaatataaaaaaaaaaaaaaaatata

SEQ ID NO: 11040 - RNA, 70 nt, synthetic construct
  source 1..70: mol_type = other RNA
aaaaaaaaaaaaatataaataaataaaaaaaaaaaaaaaaaaaaaaaaaaaaaaaaaaaaaaaaaatata

SEQ ID NO: 11041 - RNA, 70 nt, synthetic construct
  source 1..70: mol_type = other RNA
aaaaaaaaaaaaaaaaaaaaaaaaaaaaaaaaaaaaaaaaaaatataaataaaaaaaaaaaataaatata

SEQ ID NO: 11042 - RNA, 70 nt, synthetic construct
  source 1..70: mol_type = other RNA
aaaaaaaaaaaaaaaaaaaaaaaaaaaaaaaaaaaaaaaaaaataaatataaaaaaaaaaaataaatata

SEQ ID NO: 11043 - RNA, 70 nt, synthetic construct
  source 1..70: mol_type = other RNA
aaaaaaaaaaaaaaaaaaaaaaaaaaaaaaaaaaaaaaataaatataaataaaaaaaaaaaaaaaatata

SEQ ID NO: 11044 - RNA, 70 nt, synthetic construct
  source 1..70: mol_type = other RNA
aaaaaaaaaaaaaaaaaaaaaaaaaaaaaaaaaaaaaaaaaaatataaataaataaaaaaaaaaaatata

SEQ ID NO: 11045 - RNA, 70 nt, synthetic construct
  source 1..70: mol_type = other RNA
aaaaaaaaaaaaaaaaaaaaaaaaaaaaaaaaaaaaaaataaatataaataaaaaaaaaaaataaatata

SEQ ID NO: 11046 - RNA, 70 nt, synthetic construct
  source 1..70: mol_type = other RNA
aaaaaaaaaaaaaaaaaaaaaaaaaaaaaaaaaaaaaaataaataaatataaaaaaaaaaaataaatata

SEQ ID NO: 11047 - RNA, 70 nt, synthetic construct
  source 1..70: mol_type = other RNA
aaaaaaaaaaaaaaaaaaaaaaaaaaaaaaaaaaaaaaaaaaatataaataaaaaaaataaataaatata

SEQ ID NO: 11048 - RNA, 70 nt, synthetic construct
  source 1..70: mol_type = other RNA
aaaaaaaaaaaaaaaaaaaaaaaaaaaaaaaaaaaaaaataaatataaataaaaaaaataaataaatata

SEQ ID NO: 11049 - RNA, 70 nt, synthetic construct
  source 1..70: mol_type = other RNA
aaaaaaaaaaataaataaataaataaataaataaataaataaataaatataaatataaataaataaatat

SEQ ID NO: 11050 - RNA, 70 nt, synthetic construct
  source 1..70: mol_type = other RNA
aaaaaaaaaaataaataaataaataaataaataaataaataaatataaataaatataaataaataaatat

SEQ ID NO: 11051 - RNA, 70 nt, synthetic construct
  source 1..70: mol_type = other RNA
aaaaaaaaaaaaaaaaaaaaaaaaaataaataaataaataaatataaaaaaaaataaataaataaatata

SEQ ID NO: 11052 - RNA, 70 nt, synthetic construct
  source 1..70: mol_type = other RNA
aaaaaaaaaaaaaaaaaaaaaaaaaataaataaataaataaatataaataaataaaaataaataaatata

SEQ ID NO: 11053 - RNA, 70 nt, synthetic construct
  source 1..70: mol_type = other RNA
aaaaaaaaaaaaaaaaaaaaaaaaaataaataaataaataaatataaataaaaataaataaataaatata

SEQ ID NO: 11054 - RNA, 70 nt, synthetic construct
  source 1..70: mol_type = other RNA
aaaaaaaaaaaaaaaaaaaaaataaataaataaataaataaatataaaaaaaaataaataaataaatata

SEQ ID NO: 11055 - RNA, 70 nt, synthetic construct
  source 1..70: mol_type = other RNA
aaaaaaaaaaaaaaaaaataaataaataaataaataaataaatataaaaaaaaataaataaataaatata

SEQ ID NO: 11056 - RNA, 70 nt, synthetic construct
  source 1..70: mol_type = other RNA
aaaaaaaaaaaaaaaaaaaaaataaataaataaataaataaaaataaataaatataaataaataaatata

SEQ ID NO: 11057 - RNA, 70 nt, synthetic construct
  source 1..70: mol_type = other RNA
aaaaaaaaaaaaaaaaaaaaaataaataaataaataaataaatataaataaaaataaataaataaatata

SEQ ID NO: 11058 - RNA, 70 nt, synthetic construct
  source 1..70: mol_type = other RNA
aaaaaaaaaaaaaaaaaaaaaataaataaataaataaataaatataaataaataaaaataaataaatata

SEQ ID NO: 11059 - RNA, 70 nt, synthetic construct
  source 1..70: mol_type = other RNA
aaaaaaaaaaaaaaaaaataaataaataaataaataaataaatataaataaataaaaataaataaatata

SEQ ID NO: 11060 - RNA, 70 nt, synthetic construct
  source 1..70: mol_type = other RNA
aaaaaaaaaaaaaaaaaataaataaataaataaataaataaatataaataaaaataaataaataaatata

SEQ ID NO: 11061 - RNA, 70 nt, synthetic construct
  source 1..70: mol_type = other RNA
aaaaaaaaaaaaaaaaaataaataaataaataaataaataaaaataaataaatataaataaataaatata

SEQ ID NO: 11062 - RNA, 70 nt, synthetic construct
  source 1..70: mol_type = other RNA
aaaaaaaaaaaaaataaataaataaataaataaataaataaatataaaaaaaaataaataaataaatata

SEQ ID NO: 11063 - RNA, 70 nt, synthetic construct
  source 1..70: mol_type = other RNA
aaaaaaaaaaaaaataaataaataaataaataaataaataaatataaataaataaaaaaaaataaatata

SEQ ID NO: 11064 - RNA, 70 nt, synthetic construct
  source 1..70: mol_type = other RNA
aaaaaaaaaaaaaaaaaataaataaataaataaataaataaatataaaaataaataaataaataaatata

SEQ ID NO: 11065 - RNA, 70 nt, synthetic construct
  source 1..70: mol_type = other RNA
aaataaataaaaaaaaaaaaaaaaaaaaataaataaataaaaaaaaaaaaaaaaaaaataaataaatata

SEQ ID NO: 11066 - RNA, 70 nt, synthetic construct
  source 1..70: mol_type = other RNA
aaaaaaaaaaaaaataaataaataaataaataaataaataaatataaataaataaaaataaataaatata

SEQ ID NO: 11067 - RNA, 70 nt, synthetic construct
  source 1..70: mol_type = other RNA
aaaaaaaaaataaataaataaataaataaataaataaataaatataaaaaaaaataaataaataaatata

SEQ ID NO: 11068 - RNA, 70 nt, synthetic construct
  source 1..70: mol_type = other RNA
aaaaaaaaaataaataaataaataaataaataaataaataaatataaataaataaaaaaaaataaatata

SEQ ID NO: 11069 - RNA, 70 nt, synthetic construct
  source 1..70: mol_type = other RNA
aaaaaaaaaaaaaataaataaataaataaataaataaataaatataaataaaaataaataaataaatata

SEQ ID NO: 11070 - RNA, 70 nt, synthetic construct
  source 1..70: mol_type = other RNA
aaaaaaaaaaaaaataaataaataaataaataaataaataaataaaaataaatataaataaataaatata

SEQ ID NO: 11071 - RNA, 70 nt, synthetic construct
  source 1..70: mol_type = other RNA
aaaaaaaaaaaaaataaataaataaataaataaataaataaaaataaataaatataaataaataaatata

SEQ ID NO: 11072 - RNA, 70 nt, synthetic construct
  source 1..70: mol_type = other RNA
aaaaaaaaaaaaaaaaaataaaaaaaaaaaaaaaaaaaaaaaaaaaaaaaaaaaaaaaaaaaataaataa

SEQ ID NO: 11073 - RNA, 70 nt, synthetic construct
  source 1..70: mol_type = other RNA
aaaaataaataaaaaaaaaaaaaaaaaaaaaaaaaaaaaaaaaaaaaaaaaaaaaaaaaaaaaaaaataa

SEQ ID NO: 11074 - RNA, 70 nt, synthetic construct
  source 1..70: mol_type = other RNA
aaaaaaaaaaaaaaaaaaaaaaaaataaataaaaaaaaaaaaaaaaaaaaaaaaaaaaaaaaaaaaataa

SEQ ID NO: 11075 - RNA, 70 nt, synthetic construct
  source 1..70: mol_type = other RNA
aaaaaaaaaaataaataaaaaaaaaaaaaaaaaaaaaaaaaaaaaaaaaaaaaaaaaaaaaaaaaaataa

SEQ ID NO: 11076 - RNA, 70 nt, synthetic construct
  source 1..70: mol_type = other RNA
aaataaataaataaaaaaaaaaaaaaaaataaataaataaaaaaaaaaaaaaaaaaaataaataaatata

SEQ ID NO: 11077 - RNA, 70 nt, synthetic construct
  source 1..70: mol_type = other RNA
aaaaaaaaaataaataaaaaaaaaaaaaaaaaaaaaaaaaaaaaaaaaaaaaaaaataaataaatatata

SEQ ID NO: 11078 - RNA, 70 nt, synthetic construct
  source 1..70: mol_type = other RNA
aaaaaaaaaaaaaataaaaaaaaaaaaaaaaaaaaaaaaaaaaaaaaaaaaataaataaataaatatata

SEQ ID NO: 11079 - RNA, 70 nt, synthetic construct
  source 1..70: mol_type = other RNA
aaaaaaaaaataaataaataaataaataaataaataaataaatataaataaataaaaataaataaatata

SEQ ID NO: 11080 - RNA, 70 nt, synthetic construct
  source 1..70: mol_type = other RNA
aaaaaaaaaataaataaataaataaataaataaataaataaatataaataaaaataaataaataaatata

SEQ ID NO: 11081 - RNA, 70 nt, synthetic construct
  source 1..70: mol_type = other RNA
aaaaaaaaaataaataaataaataaataaataaataaataaaaataaataaatataaataaataaatata

SEQ ID NO: 11082 - RNA, 70 nt, synthetic construct
  source 1..70: mol_type = other RNA
aaaaaaaaaataaataaataaataaataaataaataaataaataaaaataaatataaataaataaatata

SEQ ID NO: 11083 - RNA, 70 nt, synthetic construct
  source 1..70: mol_type = other RNA
aaaaaaaaaaaaaaaaaataaaaaaaaaaaaaaaaaaaaaaaaaaaaaaaaaaaaaaaataaataaataa

SEQ ID NO: 11084 - RNA, 70 nt, synthetic construct
  source 1..70: mol_type = other RNA
aaaaaaaaaaaaaaaaaaaaataaataaataaaaaaaaaaaaaaaaaaaaaaaaaaaaaaaaaaaaataa

SEQ ID NO: 11085 - RNA, 70 nt, synthetic construct
  source 1..70: mol_type = other RNA
aaaaaaaaaaataaataaataaaaaaaaaaaaaaaaaaaaaaaaaaaaaaaaaaaaaaaaaaaaaaataa

SEQ ID NO: 11086 - RNA, 70 nt, synthetic construct
  source 1..70: mol_type = other RNA
aaaaaaaaaaaaaaaaaaaataaataaataaaaaaaaaaaaaaaaaaaaaaaaaaataaataaatatata

SEQ ID NO: 11087 - RNA, 70 nt, synthetic construct
  source 1..70: mol_type = other RNA
aaaaaaaaaataaataaaaaaaaaaaaaaaaaaaaaaaaaaaaaaaaaaaaataaataaataaatatata

SEQ ID NO: 11088 - RNA, 70 nt, synthetic construct
  source 1..70: mol_type = other RNA
aaaaaaaaaaaaaataaataaaaaaaaaaaaaaaaaaaaaaaaaaaaaaaaataaataaataaatatata

SEQ ID NO: 11089 - RNA, 70 nt, synthetic construct
  source 1..70: mol_type = other RNA
aaaaaaaaaaaaaaaaaataaataaaaaaaaaaaaaaaaaaaaaaaaaaaaaaaaaaaataaataaataa

SEQ ID NO: 11090 - RNA, 70 nt, synthetic construct
  source 1..70: mol_type = other RNA
aaaaaaaaaaaaaaaaaataaaaaaaaaaaaaaaaaaaaaaaaaaaaaaaaaaaataaataaataaataa

SEQ ID NO: 11091 - RNA, 70 nt, synthetic construct
  source 1..70: mol_type = other RNA
aaaaaaaaaaaaaaaaaaaaataaataaataaataaaaaaaaaaaaaaaaaaaaaaaaaaaaaaaaataa

SEQ ID NO: 11092 - RNA, 70 nt, synthetic construct
  source 1..70: mol_type = other RNA
aaaaaaaaaaaaaaaataaataaataaataaaaaaaaaaaaaaaaaaaaaaaaaaataaataaatatata

SEQ ID NO: 11093 - RNA, 70 nt, synthetic construct
  source 1..70: mol_type = other RNA
aaaaaaaaaaaaaaaaaaaataaataaataaataaaaaaaaaaaaaaaaaaaaaaataaataaatatata

SEQ ID NO: 11094 - RNA, 70 nt, synthetic construct
  source 1..70: mol_type = other RNA
aaaaaataaataaataaaaaaaaaaaaaaaaaaaaaaaaaaaaaaaaaaaaataaataaataaatatata

SEQ ID NO: 11095 - RNA, 70 nt, synthetic construct
  source 1..70: mol_type = other RNA
aaaaaaaaaataaataaataaaaaaaaaaaaaaaaaaaaaaaaaaaaaaaaataaataaataaatatata

SEQ ID NO: 11096 - RNA, 70 nt, synthetic construct
  source 1..70: mol_type = other RNA
aaaaaaaaaaaaaaaaaataaataaaaaaaaaaaaaaaaaaaaaaaaaaaaaaaataaataaataaataa

SEQ ID NO: 11097 - RNA, 70 nt, synthetic construct
  source 1..70: mol_type = other RNA
aaaaaaaaaaaaaaaaaataaaaaaaaaaaaaaaaaaaaaaaaaaaaaaaataaataaataaataaataa

SEQ ID NO: 11098 - RNA, 70 nt, synthetic construct
  source 1..70: mol_type = other RNA
aaaaaaaaaaaaaaaaaaaaataaataaataaataaataaaaaaaaaaaaaaaaaaaaaaaaaaaaataa

SEQ ID NO: 11099 - RNA, 70 nt, synthetic construct
  source 1..70: mol_type = other RNA
aaaaaaaataaaaaaaaaaaaaaaaaaaaaaaaaaaaaaaaaaaaaaaaaataaataaataaataaataa

SEQ ID NO: 11100 - RNA, 70 nt, synthetic construct
  source 1..70: mol_type = other RNA
aaaaaaaaaaaaaaaataaataaataaataaataaaaaaaaaaaaaaaaaaaaaaataaataaatatata

SEQ ID NO: 11101 - RNA, 70 nt, synthetic construct
  source 1..70: mol_type = other RNA
aaaaaataaataaataaataaaaaaaaaaaaaaaaaaaaaaaaaaaaaaaaataaataaataaatatata

SEQ ID NO: 11102 - RNA, 70 nt, synthetic construct
  source 1..70: mol_type = other RNA
aaaaaaaaaaaaaaaaaataaaaaaaaaaaaaaaaaaaaaaaaaaaataaataaataaataaataaataa

SEQ ID NO: 11103 - RNA, 70 nt, synthetic construct
  source 1..70: mol_type = other RNA
aaaaaaaaaaaaaaaaaataaataaaaaaaaaaaaaaaaaaaaaaaaaaaataaataaataaataaataa

SEQ ID NO: 11104 - RNA, 70 nt, synthetic construct
  source 1..70: mol_type = other RNA
aaaaaaaataaataaaaaaaaaaaaaaaaaaaaaaaaaaaaaaaaaaaaaataaataaataaataaataa

SEQ ID NO: 11105 - RNA, 70 nt, synthetic construct
  source 1..70: mol_type = other RNA
aaaataaataaaaaaaaaaaaaaaaaaaaaaaaaaaaaaaaaaaaaaaaaataaataaataaataaataa

SEQ ID NO: 11106 - RNA, 70 nt, synthetic construct
  source 1..70: mol_type = other RNA
aaaaaaaataaaaaaaaaaaaaaaaaaaaaaaaaaaaaaaaaaaaaataaataaataaataaataaataa

SEQ ID NO: 11107 - RNA, 70 nt, synthetic construct
  source 1..70: mol_type = other RNA
aaaaaaaaaaaaaaaaaataaataaaaaaaaaaaaaaaaaaaaaaaataaataaataaataaataaataa

SEQ ID NO: 11108 - RNA, 70 nt, synthetic construct
  source 1..70: mol_type = other RNA
aaaataaataaaaaaaaaaaaaaaaaaaaaaaaaaaaaaaaaaaaaataaataaataaataaataaataa

SEQ ID NO: 11109 - RNA, 70 nt, synthetic construct
  source 1..70: mol_type = other RNA
aaaaaaaataaataaaaaaaaaaaaaaaaaaaaaaaaaaaaaaaaaataaataaataaataaataaataa

SEQ ID NO: 11110 - RNA, 70 nt, synthetic construct
  source 1..70: mol_type = other RNA
aaaataaataaataaaaaaaaaaaaaaaaaaaaaaaaaaaaaaaaaaaaaataaataaataaataaataa

SEQ ID NO: 11111 - RNA, 70 nt, synthetic construct
  source 1..70: mol_type = other RNA
aaaataaataaataaaaaaaaaaaaaaaaaaaaaaaaaaaaaaaaaataaataaataaataaataaataa

SEQ ID NO: 11112 - RNA, 70 nt, synthetic construct
  source 1..70: mol_type = other RNA
aaaaaaaataaataaataaataaataaataaataaaaaaaaaaaaaaaaaaaaaataaataaataaataa

SEQ ID NO: 11113 - RNA, 71 nt, synthetic construct
  source 1..71: mol_type = other RNA
aaaaaaaaaaaaaaaaaaaaaaaaaaaaaaaaaaaaaaaaaaaaataaataaataaatataaataaatata

SEQ ID NO: 11114 - RNA, 71 nt, synthetic construct
  source 1..71: mol_type = other RNA
aaaaaaaaaaaaaaaaaaaaaaaaaaaaaaaaaaaaaaaaataaataaataaataaatataaataaatata

SEQ ID NO: 11115 - RNA, 71 nt, synthetic construct
  source 1..71: mol_type = other RNA
aaaaaaaaaaaaaaaaaaaaaaataaatataaataaatataaataaataaataaataaataaataaatata

SEQ ID NO: 11116 - RNA, 71 nt, synthetic construct
  source 1..71: mol_type = other RNA
aaaaaaaaaaaaaaaaaaaaaaataaatataaataaataaatataaataaataaataaataaataaatata

SEQ ID NO: 11117 - RNA, 71 nt, synthetic construct
  source 1..71: mol_type = other RNA
aaataaaaaaaaaaaaaaaaaaaaaaaaaaaaaaaaaaaaaaaaataaataaataaatataaataaatata

SEQ ID NO: 11118 - RNA, 71 nt, synthetic construct
  source 1..71: mol_type = other RNA
aaataaaaaaaaaaaaaaaaaaaaaaaaaaaaaaaaaaaaataaataaataaatataaataaataaatata

SEQ ID NO: 11119 - RNA, 71 nt, synthetic construct
  source 1..71: mol_type = other RNA
aaataaaaaaaaaaaaaaaaaaaaaaaaaaaaaaaaaaaaataaataaataaataaatataaataaatata

SEQ ID NO: 11120 - RNA, 71 nt, synthetic construct
  source 1..71: mol_type = other RNA
aaataaataaaaaaaaaaaaaaaaaaaaaaaaaaaaaaaaataaataaataaatataaataaataaatata

SEQ ID NO: 11121 - RNA, 71 nt, synthetic construct
  source 1..71: mol_type = other RNA
aaataaataaaaaaaaaaaaaaaaaaaaaaaaaaaaaaaaataaataaataaataaatataaataaatata

SEQ ID NO: 11122 - RNA, 71 nt, synthetic construct
  source 1..71: mol_type = other RNA
aaaaaaaaaaaaaaaaaaaaaaaaaaaaaaaaaaaaaaaaaaaaataaataaataaataaaaataaatata

SEQ ID NO: 11123 - RNA, 71 nt, synthetic construct
  source 1..71: mol_type = other RNA
aaaaaaaaaaaaaaaaaaaaatataaatataaataaatataaataaataaataaataaataaataaatata

SEQ ID NO: 11124 - RNA, 71 nt, synthetic construct
  source 1..71: mol_type = other RNA
aaaaaaaaaaaaaaaaaaaaatataaatataaataaataaatataaataaataaataaataaataaatata

SEQ ID NO: 11125 - RNA, 71 nt, synthetic construct
  source 1..71: mol_type = other RNA
aaaaaaaaaaaaaaaaaaaaaaaaaaaaaaaaaaaaaaaaaaaaaaaaaaaaatataaatataaatatata

SEQ ID NO: 11126 - RNA, 71 nt, synthetic construct
  source 1..71: mol_type = other RNA
aaaaaaaaaaaaaaaaataaatataaatataaataaatataaataaataaataaataaataaataaatata

SEQ ID NO: 11127 - RNA, 71 nt, synthetic construct
  source 1..71: mol_type = other RNA
aaataaaaaaaaaaaaaaaaaaaaaaaaaaaaaaaaaaatataaataaataaatataaataaataaatata

SEQ ID NO: 11128 - RNA, 71 nt, synthetic construct
  source 1..71: mol_type = other RNA
aaataaaaaaaaaaaaaaaaaaaaaaaaaaaaaaaaaaatataaataaataaataaatataaataaatata

SEQ ID NO: 11129 - RNA, 71 nt, synthetic construct
  source 1..71: mol_type = other RNA
aaataaaaaaaaaaaaaaaaaaaaaaaaaaaaaaataaatataaataaataaatataaataaataaatata

SEQ ID NO: 11130 - RNA, 71 nt, synthetic construct
  source 1..71: mol_type = other RNA
aaataaataaaaaaaaaaaaaaaaaaaaaaaaaaaaaaatataaataaataaataaatataaataaatata

SEQ ID NO: 11131 - RNA, 71 nt, synthetic construct
  source 1..71: mol_type = other RNA
aaataaataaaaaaaaaaaaaaaaaaaaaaaaaaaaaaatataaataaataaatataaataaataaatata

SEQ ID NO: 11132 - RNA, 71 nt, synthetic construct
  source 1..71: mol_type = other RNA
aaataaaaaaaaaaaaaaaaaaaaaaaaaaaaaaataaatataaataaataaataaatataaataaatata

SEQ ID NO: 11133 - RNA, 71 nt, synthetic construct
  source 1..71: mol_type = other RNA
aaataaataaaaaaaaaaaaaaaaaaaaaaaaaaataaatataaataaataaatataaataaataaatata

SEQ ID NO: 11134 - RNA, 71 nt, synthetic construct
  source 1..71: mol_type = other RNA
aaataaataaaaaaaaaaaaaaaaaaaaaaaaaaataaatataaataaataaataaatataaataaatata

SEQ ID NO: 11135 - RNA, 71 nt, synthetic construct
  source 1..71: mol_type = other RNA
aaataaaaaaaaaaaaaaaaaaaaaaaaaaaaaaaaaaaaataaataaataaataaatataaataaataaa

SEQ ID NO: 11136 - RNA, 71 nt, synthetic construct
  source 1..71: mol_type = other RNA
aaaaaaaaaataaatataaataaaaaaaaaaaaaaaaaaaaaaaaaaaaaaaaaaaaaaaaaaaaaatata

SEQ ID NO: 11137 - RNA, 71 nt, synthetic construct
  source 1..71: mol_type = other RNA
aaaaaaaaataaaaaaaaaaaaaaaaaaaaaaaaaaaaaaaaaaataaataaataaatataaataaatata

SEQ ID NO: 11138 - RNA, 71 nt, synthetic construct
  source 1..71: mol_type = other RNA
aaaaaaaaaaaaaaaaaaaaaaaaaaaaaaaaaaataaaaaaaaataaataaataaatataaataaatata

SEQ ID NO: 11139 - RNA, 71 nt, synthetic construct
  source 1..71: mol_type = other RNA
aaaaaaaaaaaaaaaaaaaaataaaaaaaaaaaaaaaaaaaaaaataaataaataaatataaataaatata

SEQ ID NO: 11140 - RNA, 71 nt, synthetic construct
  source 1..71: mol_type = other RNA
aaaaaatataaaaaaaaaaaaaaaaaaaaaaaaaaaaaataaataaataaataaataaataaataaatata

SEQ ID NO: 11141 - RNA, 71 nt, synthetic construct
  source 1..71: mol_type = other RNA
aaaaaaaaaaaaaaaaaaaaaaataaatataaataaataaaaataaataaataaataaataaataaatata

SEQ ID NO: 11142 - RNA, 71 nt, synthetic construct
  source 1..71: mol_type = other RNA
aaaaaaaaaaaaaaaaaaaaaaataaataaaaataaatataaataaataaataaataaataaataaatata

SEQ ID NO: 11143 - RNA, 71 nt, synthetic construct
  source 1..71: mol_type = other RNA
aaaaaaaaaaaaaataaatataaataaataaataaataaataaaaaaaaaataaataaataaataaatata

SEQ ID NO: 11144 - RNA, 71 nt, synthetic construct
  source 1..71: mol_type = other RNA
aaataaaaaaaaaaaaaaaaaaaaaaaaaaaaaaaaaaaaataaataaataaataaaaataaataaatata

SEQ ID NO: 11145 - RNA, 71 nt, synthetic construct
  source 1..71: mol_type = other RNA
aaaaaaaaaaaaaataaatataaataaataaataaataaataaaaaataaataaataaataaataaatata

SEQ ID NO: 11146 - RNA, 71 nt, synthetic construct
  source 1..71: mol_type = other RNA
aaaaaaaaaaaaaataaatataaataaataaataaataaataaataaaaaataaataaataaataaatata

SEQ ID NO: 11147 - RNA, 71 nt, synthetic construct
  source 1..71: mol_type = other RNA
aaaaaaaaaaaaaataaatataaataaataaataaataaaaaataaataaataaataaataaataaatata

SEQ ID NO: 11148 - RNA, 71 nt, synthetic construct
  source 1..71: mol_type = other RNA
aaataaataaaaaaaaaaaaaaaaaaaaaaaaaaaaaaaaataaataaataaataaaaataaataaatata

SEQ ID NO: 11149 - RNA, 71 nt, synthetic construct
  source 1..71: mol_type = other RNA
aaaaaaaaaaaaaaaaaaaaaaataaatataaataaatataaatataaatataaataaataaataaatata

SEQ ID NO: 11150 - RNA, 71 nt, synthetic construct
  source 1..71: mol_type = other RNA
aaataaaaaaaaaaaaaaaaaaaaaaaaaaaaatataaatataaataaataaatataaataaataaatata

SEQ ID NO: 11151 - RNA, 71 nt, synthetic construct
  source 1..71: mol_type = other RNA
aaataaaaaaaaaaaaaaaaaaaaaaaaaaaaatataaatataaataaataaataaatataaataaatata

SEQ ID NO: 11152 - RNA, 71 nt, synthetic construct
  source 1..71: mol_type = other RNA
aaataaataaaaaaaaaaaaaaaaaaaaaaaaatataaatataaataaataaatataaataaataaatata

SEQ ID NO: 11153 - RNA, 71 nt, synthetic construct
  source 1..71: mol_type = other RNA
aaataaataaaaaaaaaaaaaaaaaaaaaaaaatataaatataaataaataaataaatataaataaatata

SEQ ID NO: 11154 - RNA, 71 nt, synthetic construct
  source 1..71: mol_type = other RNA
aaataaaaaaaaaaaaaaaaaaaaaaaaataaatataaatataaataaataaatataaataaataaatata

SEQ ID NO: 11155 - RNA, 71 nt, synthetic construct
  source 1..71: mol_type = other RNA
aaataaaaaaaaaaaaaaaaaaaaaaaaataaatataaatataaataaataaataaatataaataaatata

SEQ ID NO: 11156 - RNA, 71 nt, synthetic construct
  source 1..71: mol_type = other RNA
aaataaaaaaaaaaaaaaaaaaaaataaataaatataaatataaataaataaatataaataaataaatata

SEQ ID NO: 11157 - RNA, 71 nt, synthetic construct
  source 1..71: mol_type = other RNA
aaataaataaaaaaaaaaaaaaaaaaaaataaatataaatataaataaataaatataaataaataaatata

SEQ ID NO: 11158 - RNA, 71 nt, synthetic construct
  source 1..71: mol_type = other RNA
aaataaataaaaaaaaaaaaaaaaaaaaataaatataaatataaataaataaataaatataaataaatata

SEQ ID NO: 11159 - RNA, 71 nt, synthetic construct
  source 1..71: mol_type = other RNA
aaataaaaaaaaaaaaaaaaaaaaataaataaatataaatataaataaataaataaatataaataaatata

SEQ ID NO: 11160 - RNA, 71 nt, synthetic construct
  source 1..71: mol_type = other RNA
aaaaaaaaaaaaaaaaaaaaaaaaaaaaaaaaaaaaaaaaaaaaaaaaaaaaatataaatataaatataaa

SEQ ID NO: 11161 - RNA, 71 nt, synthetic construct
  source 1..71: mol_type = other RNA
aaataaataaaaaaaaaaaaaaaaataaataaatataaatataaataaataaatataaataaataaatata

SEQ ID NO: 11162 - RNA, 71 nt, synthetic construct
  source 1..71: mol_type = other RNA
aaaaaaaaaaaaaaaaaaaaaaaaaaaaaaaaaaaaaaaaaaaaaaaaataaatataaatataaatataaa

SEQ ID NO: 11163 - RNA, 71 nt, synthetic construct
  source 1..71: mol_type = other RNA
aaataaaaaaaaaaaaaaaaaaaaaaaaaaaaaaaaaaaaaaaaaaaaaaaaatataaatataaatatata

SEQ ID NO: 11164 - RNA, 71 nt, synthetic construct
  source 1..71: mol_type = other RNA
aaaaaaaaaaaaaaaaaaaaaaaaaaaaaaaaaaaaaaaaaaaaataaataaatataaatataaatataaa

SEQ ID NO: 11165 - RNA, 71 nt, synthetic construct
  source 1..71: mol_type = other RNA
aaaaaaaaaaaaaaaaaaaaaaataaatataaataaatataaataaataaataaataaatatataaatata

SEQ ID NO: 11166 - RNA, 71 nt, synthetic construct
  source 1..71: mol_type = other RNA
aaaaaaaaaaaaaaaaaaaaaaataaatataaataaatataaatatataaataaataaataaataaatata

SEQ ID NO: 11167 - RNA, 71 nt, synthetic construct
  source 1..71: mol_type = other RNA
aaaaaaaaaaaaaaaaaaaaaaataaatataaataaatataaataaatatataaataaataaataaatata

SEQ ID NO: 11168 - RNA, 71 nt, synthetic construct
  source 1..71: mol_type = other RNA
aaataaaaaaaaaaaaaaaaaaaaaaaaaaaaaaaaaaaaataaataaataaatataaatatataaatata

SEQ ID NO: 11169 - RNA, 71 nt, synthetic construct
  source 1..71: mol_type = other RNA
aaataaataaaaaaaaaaaaaaaaaaaaaaaaaaaaaaaaataaataaataaatataaatatataaatata

SEQ ID NO: 11170 - RNA, 71 nt, synthetic construct
  source 1..71: mol_type = other RNA
aaaaaaaaaaaaaaaaaaaaaaataaatataaataaatatatataaataaataaataaataaataaatata

SEQ ID NO: 11171 - RNA, 71 nt, synthetic construct
  source 1..71: mol_type = other RNA
aaaaaaaaaaaaaaaaaaaaaaataaatatatataaatataaataaataaataaataaataaataaatata

SEQ ID NO: 11172 - RNA, 71 nt, synthetic construct
  source 1..71: mol_type = other RNA
aataaaaaaaaaaaaaaaaaaaaaaaaaaaaaaaaaaaaaaaaaataaataaataaatataaataaatata

SEQ ID NO: 11173 - RNA, 71 nt, synthetic construct
  source 1..71: mol_type = other RNA
aaaaaaaaaaaaaataaatataaataaataaataaataaataaataataaataaataaataaataaatata

SEQ ID NO: 11174 - RNA, 71 nt, synthetic construct
  source 1..71: mol_type = other RNA
aaaaaaaaaaaaaataaatataaataaataaataaataaataataaataaataaataaataaataaatata

SEQ ID NO: 11175 - RNA, 71 nt, synthetic construct
  source 1..71: mol_type = other RNA
aaataaaaaaaaaaaaaaaaaaaaaaaaaaaaaaaaaaaaataaataaataaatatatataaataaatata

SEQ ID NO: 11176 - RNA, 71 nt, synthetic construct
  source 1..71: mol_type = other RNA
aaataaataaaaaaaaaaaaaaaaaaaaaaaaaaaaaaaaataaataaataaataaatatatataaatata

SEQ ID NO: 11177 - RNA, 71 nt, synthetic construct
  source 1..71: mol_type = other RNA
aaataaataaaaaaaaaaaaaaaaaaaaaaaaaaaaaaaaataaataaataaatatatataaataaatata

SEQ ID NO: 11178 - RNA, 71 nt, synthetic construct
  source 1..71: mol_type = other RNA
aaaaaaaaaaaaaaaaaaaaaaataaatataaataaatataaataaataaataaaaaaaaaaataaatata

SEQ ID NO: 11179 - RNA, 71 nt, synthetic construct
  source 1..71: mol_type = other RNA
aaaaaaaaaaaaaaaaaaaaaaataaatataaataaataaatataaataaataaaaaaaaaaataaatata

SEQ ID NO: 11180 - RNA, 71 nt, synthetic construct
  source 1..71: mol_type = other RNA
aaaaaaaaaaaaaaaaaaaaaaataaatataaataaataaatataaataaataaaaaaataaataaatata

SEQ ID NO: 11181 - RNA, 71 nt, synthetic construct
  source 1..71: mol_type = other RNA
aaaaaaaaaaaaaaaaaaaaaaataaatataaataaatataaataaataaataaaaaaataaataaatata

SEQ ID NO: 11182 - RNA, 71 nt, synthetic construct
  source 1..71: mol_type = other RNA
aaaaaaaaaaaaaaaaaaaaaaataaatataaataaatataaataaataaataaataaaaaaataaatata

SEQ ID NO: 11183 - RNA, 71 nt, synthetic construct
  source 1..71: mol_type = other RNA
aaaaaaaaaaaaaaaaaaaaaaataaatataaataaataaatataaataaataaataaaaaaataaatata

SEQ ID NO: 11184 - RNA, 71 nt, synthetic construct
  source 1..71: mol_type = other RNA
aaataaaaaaaaaaaaaaaaaaaaaaaaaaaaaaataaaaaaaaaaaaataaatataaataaataaatata

SEQ ID NO: 11185 - RNA, 71 nt, synthetic construct
  source 1..71: mol_type = other RNA
aaataaaaaaaaaaaaaaaaaaaaaaaaaaaaaaaaaaaaataaaaaaataaataaatataaataaatata

SEQ ID NO: 11186 - RNA, 71 nt, synthetic construct
  source 1..71: mol_type = other RNA
aaaaaaaaaaaaaaaaaaaaaaaaaaaaaaaaaaaaaaaaaaaaaaaaaaaaataaaaatataaatatata

SEQ ID NO: 11187 - RNA, 71 nt, synthetic construct
  source 1..71: mol_type = other RNA
aaaaaaaaaaaatataaatataaataaataaataaataaataaaaaaaaaataaataaataaataaatata

SEQ ID NO: 11188 - RNA, 71 nt, synthetic construct
  source 1..71: mol_type = other RNA
aaaaaaaaaaaaaaaaataaaaataaatataaataaatataaataaataaataaataaataaataaatata

SEQ ID NO: 11189 - RNA, 71 nt, synthetic construct
  source 1..71: mol_type = other RNA
aaatataaataaataaataaataaataaaaaaaaaaaaaaaaaaaaaataaaaaaaaaaaaaaaaaatata

SEQ ID NO: 11190 - RNA, 71 nt, synthetic construct
  source 1..71: mol_type = other RNA
aaataaaaaaaaaaaaaaaaaaaaaaaaaaaaaaataaaaaaaaataaataaatataaataaataaatata

SEQ ID NO: 11191 - RNA, 71 nt, synthetic construct
  source 1..71: mol_type = other RNA
aaataaaaaaaaaaaaaaaaaaaaaaaaaaaaaaataaaaaaaaataaataaataaatataaataaatata

SEQ ID NO: 11192 - RNA, 71 nt, synthetic construct
  source 1..71: mol_type = other RNA
aaaaaaaaaaaatataaatataaataaataaataaataaataaaaaataaataaataaataaataaatata

SEQ ID NO: 11193 - RNA, 71 nt, synthetic construct
  source 1..71: mol_type = other RNA
aaaaaaaaaaaatataaatataaataaataaataaataaataaataaaaaataaataaataaataaatata

SEQ ID NO: 11194 - RNA, 71 nt, synthetic construct
  source 1..71: mol_type = other RNA
aaatataaataaataaataaataaataaaaaaaaaaaaaaaaaaaaaataaataaaaaaaaaaaaaatata

SEQ ID NO: 11195 - RNA, 71 nt, synthetic construct
  source 1..71: mol_type = other RNA
aaatataaataaataaataaataaataaaaaaaaaaaaaaaaaataaataaaaaaaaaaaaaaaaaatata

SEQ ID NO: 11196 - RNA, 71 nt, synthetic construct
  source 1..71: mol_type = other RNA
aaataaaaaaaaaaaaaaaaaaaaaaaaaaaaaaataaaaataaataaataaatataaataaataaatata

SEQ ID NO: 11197 - RNA, 71 nt, synthetic construct
  source 1..71: mol_type = other RNA
aaataaaaaaaaaaaaaaaaaaaaaaaaaaaaataaaaaaataaataaataaatataaataaataaatata

SEQ ID NO: 11198 - RNA, 71 nt, synthetic construct
  source 1..71: mol_type = other RNA
aaataaaaaaaaaaaaaaaaaaaaaaaaaaaaaaataaaaataaataaataaataaatataaataaatata

SEQ ID NO: 11199 - RNA, 71 nt, synthetic construct
  source 1..71: mol_type = other RNA
aaataaataaaaaaaaaaaaaaaaaaaaaaaaaaataaaaaaaaataaataaatataaataaataaatata

SEQ ID NO: 11200 - RNA, 71 nt, synthetic construct
  source 1..71: mol_type = other RNA
aaataaataaaaaaaaaaaaaaaaaaaaaaaaaaataaaaaaaaataaataaataaatataaataaatata

SEQ ID NO: 11201 - RNA, 71 nt, synthetic construct
  source 1..71: mol_type = other RNA
aaataaaaaaaaaaaaaaaaaaaaaaaaataaaaaaaaaaataaataaataaatataaataaataaatata

SEQ ID NO: 11202 - RNA, 71 nt, synthetic construct
  source 1..71: mol_type = other RNA
aaataaaaaaaaaaaaaaaaaaaaataaaaaaaaaaaaaaataaataaataaatataaataaataaatata

SEQ ID NO: 11203 - RNA, 71 nt, synthetic construct
  source 1..71: mol_type = other RNA
aaataaaaaaaaaaaaaaaaaaaaaaaaaaaaaaataaataaaaataaataaatataaataaataaatata

SEQ ID NO: 11204 - RNA, 71 nt, synthetic construct
  source 1..71: mol_type = other RNA
aaataaaaaaaaaaaaaaaaaaaaaaaaaaaaataaaaaaataaataaataaataaatataaataaatata

SEQ ID NO: 11205 - RNA, 71 nt, synthetic construct
  source 1..71: mol_type = other RNA
aaataaaaaaaaaaaaaaaaataaaaaaaaaaaaaaaaaaataaataaataaataaatataaataaatata

SEQ ID NO: 11206 - RNA, 71 nt, synthetic construct
  source 1..71: mol_type = other RNA
aaataaaaaaaaataaaaaaaaaaaaaaaaaaaaaaaaaaataaataaataaataaatataaataaatata

SEQ ID NO: 11207 - RNA, 71 nt, synthetic construct
  source 1..71: mol_type = other RNA
aaataaaaaaaaaaaaaaaataaaaaaaaaaaaaaaaaaaataaataaataaataaatataaataaatata

SEQ ID NO: 11208 - RNA, 71 nt, synthetic construct
  source 1..71: mol_type = other RNA
aaatataaataaataaataaataaataaaaaaaaaaaaaaaaaataaataaataaaaaaaaaaaaaatata

SEQ ID NO: 11209 - RNA, 71 nt, synthetic construct
  source 1..71: mol_type = other RNA
aaataaataaaaaaaaaaaaaaaaaaaaaaaaaaataaaaataaataaataaatataaataaataaatata

SEQ ID NO: 11210 - RNA, 71 nt, synthetic construct
  source 1..71: mol_type = other RNA
aaataaataaaaaaaataaaaaaaaaaaaaaaaaaaaaaaataaataaataaatataaataaataaatata

SEQ ID NO: 11211 - RNA, 71 nt, synthetic construct
  source 1..71: mol_type = other RNA
aaataaataaaaaaaaaaaaaaaaaaaaaaaaaaataaaaataaataaataaataaatataaataaatata

SEQ ID NO: 11212 - RNA, 71 nt, synthetic construct
  source 1..71: mol_type = other RNA
aaataaataaaaaaaaaaaaaaaaaaaaaaaaaaataaataaaaataaataaatataaataaataaatata

SEQ ID NO: 11213 - RNA, 71 nt, synthetic construct
  source 1..71: mol_type = other RNA
aaataaaaaaaaaaaaaaaaaaaaataaataaaaaaaaaaataaataaataaatataaataaataaatata

SEQ ID NO: 11214 - RNA, 71 nt, synthetic construct
  source 1..71: mol_type = other RNA
aaataaataaaaaaaaaaaaaaaaaaaaaaaaataaaaaaataaataaataaataaatataaataaatata

SEQ ID NO: 11215 - RNA, 71 nt, synthetic construct
  source 1..71: mol_type = other RNA
aaataaataaaaaaaaaaaaaaaaaaaaaaaaaaataaatataaataaataaataaaaataaataaatata

SEQ ID NO: 11216 - RNA, 72 nt, synthetic construct
  source 1..72: mol_type = other RNA
aaaaaaaaaaaaaaaaaaaaaaaaaaaaaaaaaaaaaaaaaaaaaaaaaaaaaaaataaataaataaatata

SEQ ID NO: 11217 - RNA, 72 nt, synthetic construct
  source 1..72: mol_type = other RNA
aaaaaaaaaaaaaaaaaaaaaaaaaaaaaaaaaaaaaaaaaaaaaaaaaaaaaaaaaaaaaaaaataaataa

SEQ ID NO: 11218 - RNA, 72 nt, synthetic construct
  source 1..72: mol_type = other RNA
aaaaaaaaaaaaaaaaaaaaaaaaaaaaaaaaaaaaaaaaaaataaataaataaataaataaataaatataa

SEQ ID NO: 11219 - RNA, 72 nt, synthetic construct
  source 1..72: mol_type = other RNA
aaaaaaaaaaaaaaaaaaaaaaaaaaaaaaaaaaaaaaataaataaataaataaataaataaataaatataa

SEQ ID NO: 11220 - RNA, 72 nt, synthetic construct
  source 1..72: mol_type = other RNA
aaaaaataaaaaaaaaaaaaaaaaaaaaaaaaaaaaaaaaaaaaaaaaaaaaaaaaaaaaaaaataaatata

SEQ ID NO: 11221 - RNA, 72 nt, synthetic construct
  source 1..72: mol_type = other RNA
aaaaaaaaaataaaaaaaaaaaaaaaaaaaaaaaaaaaaaaaaaaaaaaaaaaaaataaataaataaatata

SEQ ID NO: 11222 - RNA, 72 nt, synthetic construct
  source 1..72: mol_type = other RNA
aaaaaaaaaaaaaaaaaaaaaaaaaataaaaaaaaaaaaaaaaaaaaaaaaaaaaataaataaataaatata

SEQ ID NO: 11223 - RNA, 72 nt, synthetic construct
  source 1..72: mol_type = other RNA
aaaaaaaaaaaaaaaaaaaaaaataaaaaaaaaaaaaaaaaaaaaaaaaaaaaaaataaataaataaatata

SEQ ID NO: 11224 - RNA, 72 nt, synthetic construct
  source 1..72: mol_type = other RNA
aaaaaaaaaaaaaaaaaaaaaaaaaaaaaaaaaaaaaaaaaaaaaaaaaaataaaataaataaataaatata

SEQ ID NO: 11225 - RNA, 72 nt, synthetic construct
  source 1..72: mol_type = other RNA
aaaaaaaaaaaaaaaaaaaaaaaaaaaaaaaaaaataaataaataaataaataaataaaaaaaaaaaatata

SEQ ID NO: 11226 - RNA, 72 nt, synthetic construct
  source 1..72: mol_type = other RNA
aaaaaaaaaaaaaaaaaaaaaaaaaaaaaaaaaaaaaaaaaaataaataaataaataaataaataaatatat

SEQ ID NO: 11227 - RNA, 72 nt, synthetic construct
  source 1..72: mol_type = other RNA
aaaaaaaaaaaaaaaaaaaaaaaaaaaaaaaaaaaaaaataaataaataaataaataaataaataaatatat

SEQ ID NO: 11228 - RNA, 72 nt, synthetic construct
  source 1..72: mol_type = other RNA
aaaaaaaataaataaataaataaataaataaataaataaataaataaataaaaaaaaaaaaaaataaatata

SEQ ID NO: 11229 - RNA, 72 nt, synthetic construct
  source 1..72: mol_type = other RNA
aaaaaaaaaaaaaaaaaaaaaaaaaaaaaaaaaaaaaaaaatataaataaataaataaataaataaatataa

SEQ ID NO: 11230 - RNA, 72 nt, synthetic construct
  source 1..72: mol_type = other RNA
aaataaaaaaaaaaaaaaaaaaaaaaaaaaaaaaaaaaaaaaataaataaataaataaataaataaatataa

SEQ ID NO: 11231 - RNA, 72 nt, synthetic construct
  source 1..72: mol_type = other RNA
aaataaataaaaaaaaaaaaaaaaaaaaaaaaaaaaaaaaaaataaataaataaataaataaataaatataa

SEQ ID NO: 11232 - RNA, 72 nt, synthetic construct
  source 1..72: mol_type = other RNA
aaataaaaaaaaaaaaaaaaaaaaaaaaaaaaaaaaaaataaataaataaataaataaataaataaatataa

SEQ ID NO: 11233 - RNA, 72 nt, synthetic construct
  source 1..72: mol_type = other RNA
aataaataaaaaaaaaaaaaaaaaaaaaaaaaaaaaaaaaaaaaaaaaaaaaaaaaaaaaaaaataaatata

SEQ ID NO: 11234 - RNA, 72 nt, synthetic construct
  source 1..72: mol_type = other RNA
aaataaataaaaaaaaaaaaaaaaaaaaaaaaaaaaaaataaataaataaataaataaataaataaatataa

SEQ ID NO: 11235 - RNA, 72 nt, synthetic construct
  source 1..72: mol_type = other RNA
aataaaaaaaaaaaaaaaaaaaaaaaaaaaaaaaaaaaaaaaaaaaaaaaaaaaaataaataaataaatata

SEQ ID NO: 11236 - RNA, 72 nt, synthetic construct
  source 1..72: mol_type = other RNA
aaaaaaaaaaaaaaaataaataaatataaataaaaaaaaaaaaaaaaaaaaaaaaaaaaaaaaaaaaatata

SEQ ID NO: 11237 - RNA, 72 nt, synthetic construct
  source 1..72: mol_type = other RNA
aaaaaaaaaaaaaaaataaataaatataaataaaaaaaaaaaaaaaaaaaaaaaaaaaaaaaaataaatata

SEQ ID NO: 11238 - RNA, 72 nt, synthetic construct
  source 1..72: mol_type = other RNA
aaaaaaaaaaaaaaaataaataaatataaataaaaaaaaaaaaaaaaaaaaaaaaaaaaataaataaatata

SEQ ID NO: 11239 - RNA, 72 nt, synthetic construct
  source 1..72: mol_type = other RNA
aaaaaaaaaaaataaataaataaatataaataaaaaaaaaaaaaaaaaaaaaaaaaaaaaaaaataaatata

SEQ ID NO: 11240 - RNA, 72 nt, synthetic construct
  source 1..72: mol_type = other RNA
aaaaaaaaaaaaaaaataaataaatataaataaaaaaaaaaaaaaaaaaaaaaaaataaataaataaatata

SEQ ID NO: 11241 - RNA, 72 nt, synthetic construct
  source 1..72: mol_type = other RNA
aaaaaaaaaaaataaataaataaatataaataaaaaaaaaaaaaaaaaaaaaaaaaaaaataaataaatata

SEQ ID NO: 11242 - RNA, 72 nt, synthetic construct
  source 1..72: mol_type = other RNA
aaaaaaaaaaaataaataaataaatataaataaaaaaaaaaaaaaaaaaaaaaaaataaataaataaatata

SEQ ID NO: 11243 - RNA, 72 nt, synthetic construct
  source 1..72: mol_type = other RNA
aaaaaaataaataaataaataaatataaataaaaaaaaaaaaaaaaaaaaaaaaaaaaaataaataaatata

SEQ ID NO: 11244 - RNA, 72 nt, synthetic construct
  source 1..72: mol_type = other RNA
aaaaaataaataaataaaaaaaaaaaaaaaaaaaaaaataaataaataaataaataaatataaataaatata

SEQ ID NO: 11245 - RNA, 72 nt, synthetic construct
  source 1..72: mol_type = other RNA
aaaaaataaataaataaataaaaaaaaaaaaaaaaaaataaataaataaataaataaatataaataaatata

SEQ ID NO: 11246 - RNA, 72 nt, synthetic construct
  source 1..72: mol_type = other RNA
aaaaaataaataaataaataaataaaaaaaaaaaaaaataaataaataaataaataaatataaataaatata

SEQ ID NO: 11247 - RNA, 72 nt, synthetic construct
  source 1..72: mol_type = other RNA
aaaaaaaaaaaaaaaaaaaaaaaaaataaaaaaaaaaaaaaaaaaaaaaaaaaaaaaaaaaaaaataaataa

SEQ ID NO: 11248 - RNA, 72 nt, synthetic construct
  source 1..72: mol_type = other RNA
aaataaaaaaaaaaaaaaaaaaaaaaaaaaaaaaaaaaaaaaataaataaataaataaataaataaatatat

SEQ ID NO: 11249 - RNA, 72 nt, synthetic construct
  source 1..72: mol_type = other RNA
aaataaataaaaaaaaaaaaaaaaaaaaaaaaaaaaaaaaaaataaataaataaataaataaataaatatat

SEQ ID NO: 11250 - RNA, 72 nt, synthetic construct
  source 1..72: mol_type = other RNA
aaaaaaaaaaaaaaaaaaaaaaaaaaaaaataaataaataaataaataaaaaaaaaaaaaaaaaaaaaataa

SEQ ID NO: 11251 - RNA, 72 nt, synthetic construct
  source 1..72: mol_type = other RNA
aaaaaaaaaaaaaaaaaaaaaaaaaataaataaataaataaataaataaaaaaaaaaaaaaaaaaaaaataa

SEQ ID NO: 11252 - RNA, 72 nt, synthetic construct
  source 1..72: mol_type = other RNA
aaaaaaaaaaaaaaaaaaaaaaaaaaaaaaaaaaaaaaaaaaataaataaataaataaataaataaatatac

SEQ ID NO: 11253 - RNA, 72 nt, synthetic construct
  source 1..72: mol_type = other RNA
aaaaaaaaaaaaaaaaaaaataaaaaaaaaaaaaaaaaaaaaaaaaaaaaaaaaaataaataaataaataaa

SEQ ID NO: 11254 - RNA, 72 nt, synthetic construct
  source 1..72: mol_type = other RNA
aaaaaaaaaaaaaaaaaaaaaaaaaaaaaaaaaaaaaaaaaaaaataaaaaaaaaataaataaataaataaa

SEQ ID NO: 11255 - RNA, 72 nt, synthetic construct
  source 1..72: mol_type = other RNA
aaaaaaaaaaaaaaaaaaaaaaaaaaaaaaaaaaaaaaataaataaataaataaataaataaataaatatac

SEQ ID NO: 11256 - RNA, 72 nt, synthetic construct
  source 1..72: mol_type = other RNA
aaataaaataaataaataaataaataaataaataaataaataaataaataaaaaaaaaaaaaaataaatata

SEQ ID NO: 11257 - RNA, 72 nt, synthetic construct
  source 1..72: mol_type = other RNA
aaaaaaaaaaaaaaaaaaaataaaaaaaaaaaaaaaaaaaaaaaaaaaaaaataaataaataaataaataaa

SEQ ID NO: 11258 - RNA, 72 nt, synthetic construct
  source 1..72: mol_type = other RNA
aaaaaaaaaaaaaaaaaaaataaataaaaaaaaaaaaaaaaaaaaaaaaaaaaaaataaataaataaataaa

SEQ ID NO: 11259 - RNA, 72 nt, synthetic construct
  source 1..72: mol_type = other RNA
aaaaaaaaaaaaaaaataaataaaaaaaaaaaaaaaaaaaaaaaaaaaaaaaaaaataaataaataaataaa

SEQ ID NO: 11260 - RNA, 72 nt, synthetic construct
  source 1..72: mol_type = other RNA
aaaaaaaaaaaaaaaaaaaataaataaataaaaaaaaaaaaaaaaaaaaaaaaaaaaaaataaataaataaa

SEQ ID NO: 11261 - RNA, 72 nt, synthetic construct
  source 1..72: mol_type = other RNA
aaaaaaaaaaaaaaaaaaaataaaaaaaaaaaaaaaaaaaaaaaaaaataaataaataaataaataaataaa

SEQ ID NO: 11262 - RNA, 72 nt, synthetic construct
  source 1..72: mol_type = other RNA
aaaaaaaaaaaaaaaaaaaataaataaaaaaaaaaaaaaaaaaaaaaaaaaataaataaataaataaataaa

SEQ ID NO: 11263 - RNA, 72 nt, synthetic construct
  source 1..72: mol_type = other RNA
aaaaaaaaaaaaaaaataaataaaaaaaaaaaaaaaaaaaaaaaaaaaaaaataaataaataaataaataaa

SEQ ID NO: 11264 - RNA, 72 nt, synthetic construct
  source 1..72: mol_type = other RNA
aaaaaaaaaaaaaaaataaataaataaaaaaaaaaaaaaaaaaaaaaaaaaaaaaataaataaataaataaa

SEQ ID NO: 11265 - RNA, 72 nt, synthetic construct
  source 1..72: mol_type = other RNA
aaaaaaaaaaaaaaaaaaaataaataaaaaaaaaaaaaaaaaaaaaaataaataaataaataaataaataaa

SEQ ID NO: 11266 - RNA, 72 nt, synthetic construct
  source 1..72: mol_type = other RNA
aaaaaaaaaaaaaaaataaataaataaaaaaaaaaaaaaaaaaaaaaaaaaataaataaataaataaataaa

SEQ ID NO: 11267 - RNA, 72 nt, synthetic construct
  source 1..72: mol_type = other RNA
aaaaaaaaaaaataaataaataaaaaaaaaaaaaaaaaaaaaaaaaaaaaaataaataaataaataaataaa

SEQ ID NO: 11268 - RNA, 72 nt, synthetic construct
  source 1..72: mol_type = other RNA
aaaaaaaataaataaataaataaaaaaaaaaaaaaaaaaaaaaaaaaaaaaaaaaataaataaataaataaa

SEQ ID NO: 11269 - RNA, 72 nt, synthetic construct
  source 1..72: mol_type = other RNA
aaaaaaaaaaaaaaaataaataaaaaaaaaaaaaaaaaaaaaaaaaaataaataaataaataaataaataaa

SEQ ID NO: 11270 - RNA, 72 nt, synthetic construct
  source 1..72: mol_type = other RNA
aaaaaaaataaataaataaataaataaaaaaaaaaaaaaaaaaaaaaaaaaaaaaataaataaataaataaa

SEQ ID NO: 11271 - RNA, 72 nt, synthetic construct
  source 1..72: mol_type = other RNA
aaaaaaaaaaaataaataaataaataaaaaaaaaaaaaaaaaaaaaaaaaaataaataaataaataaataaa

SEQ ID NO: 11272 - RNA, 72 nt, synthetic construct
  source 1..72: mol_type = other RNA
aaaaaaaataaataaataaataaaaaaaaaaaaaaaaaaaaaaaaaaaaaaataaataaataaataaataaa

SEQ ID NO: 11273 - RNA, 72 nt, synthetic construct
  source 1..72: mol_type = other RNA
aaaaaaaaaaaaaaaataaataaataaaaaaaaaaaaaaaaaaaaaaataaataaataaataaataaataaa

SEQ ID NO: 11274 - RNA, 72 nt, synthetic construct
  source 1..72: mol_type = other RNA
aaaaaaaaaaaataaataaataaaaaaaaaaaaaaaaaaaaaaaaaaataaataaataaataaataaataaa

SEQ ID NO: 11275 - RNA, 72 nt, synthetic construct
  source 1..72: mol_type = other RNA
aaataaataaatataaataaataaataaaaaaaaaaaaaaaaaaaaaataaataaatataaatataaatata

SEQ ID NO: 11276 - RNA, 72 nt, synthetic construct
  source 1..72: mol_type = other RNA
aaaaaaaataaataaataaataaataaaaaaaaaaaaaaaaaaaaaaaaaaataaataaataaataaataaa

SEQ ID NO: 11277 - RNA, 72 nt, synthetic construct
  source 1..72: mol_type = other RNA
aaaaaaaataaataaataaataaaaaaaaaaaaaaaaaaaaaaaaaaataaataaataaataaataaataaa

SEQ ID NO: 11278 - RNA, 72 nt, synthetic construct
  source 1..72: mol_type = other RNA
aaaaaaaaaaaataaataaataaataaaaaaaaaaaaaaaaaaaaaaataaataaataaataaataaataaa

SEQ ID NO: 11279 - RNA, 72 nt, synthetic construct
  source 1..72: mol_type = other RNA
aaaataaataaataaataaataaataaaaaaaaaaaaaaaaaaaaaaaaaaaaaaataaataaataaataaa

SEQ ID NO: 11280 - RNA, 72 nt, synthetic construct
  source 1..72: mol_type = other RNA
aaaataaataaataaataaataaaaaaaaaaaaaaaaaaaaaaaaaaaaaaataaataaataaataaataaa

SEQ ID NO: 11281 - RNA, 72 nt, synthetic construct
  source 1..72: mol_type = other RNA
aaaaaaaataaataaataaataaataaaaaaaaaaaaaaaaaaaaaaataaataaataaataaataaataaa

SEQ ID NO: 11282 - RNA, 72 nt, synthetic construct
  source 1..72: mol_type = other RNA
aaaataaataaataaataaataaataaaaaaaaaaaaaaaaaaaaaaaaaaataaataaataaataaataaa

SEQ ID NO: 11283 - RNA, 72 nt, synthetic construct
  source 1..72: mol_type = other RNA
aaaataaataaataaataaataaaaaaaaaaaaaaaaaaaaaaaaaaataaataaataaataaataaataaa

SEQ ID NO: 11284 - RNA, 72 nt, synthetic construct
  source 1..72: mol_type = other RNA
aaaataaataaataaataaataaataaaaaaaaaaaaaaaaaaaaaaataaataaataaataaataaataaa

SEQ ID NO: 11285 - RNA, 72 nt, synthetic construct
  source 1..72: mol_type = other RNA
aaaaaaaaaaaaaaaaaaaaaaaaaaaaaaaaaaaaaaaaaaaaaaaaaaaaaaaaaaaaaaaaataaatac

SEQ ID NO: 11286 - RNA, 72 nt, synthetic construct
  source 1..72: mol_type = other RNA
aaataaataaatataaataaataaataaaaaaaaaaaaaaaaaaaaaataaataaatataaataaatatata

SEQ ID NO: 11287 - RNA, 72 nt, synthetic construct
  source 1..72: mol_type = other RNA
aataaataaaaaaaaaaaaaaaaaaaaaaaaaaaaaaaaaaaaaaaaaaaaaaaaaaaaaaatataaatata

SEQ ID NO: 11288 - RNA, 72 nt, synthetic construct
  source 1..72: mol_type = other RNA
aaaaaaaaaaaaaaaaaaaaaaaaaaaaaaaaaaaaaaaaaaataaatatataaataaataaataaatataa

SEQ ID NO: 11289 - RNA, 72 nt, synthetic construct
  source 1..72: mol_type = other RNA
aaaaaaaaaaaaaaaaaaaaaaaaaaaaaaaaaaaaaaaaaaataaataaatatataaataaataaatataa

SEQ ID NO: 11290 - RNA, 72 nt, synthetic construct
  source 1..72: mol_type = other RNA
aaataaataaatataaataaaaaaaaaaaaaaaaaaaaaaaaataaataaataaataaataaataaatataa

SEQ ID NO: 11291 - RNA, 72 nt, synthetic construct
  source 1..72: mol_type = other RNA
aaatataaataaataaaaaaaaaaaaaaaaaaaaaaaaataaataaataaataaataaataaataaatataa

SEQ ID NO: 11292 - RNA, 72 nt, synthetic construct
  source 1..72: mol_type = other RNA
aaataaataaatataaataaaaaaaaaaaaaaaaaaaaataaataaataaataaataaataaataaatataa

SEQ ID NO: 11293 - RNA, 72 nt, synthetic construct
  source 1..72: mol_type = other RNA
aaaatataaatataaaaaaaaaaaaaaaaaaaaaaaaaaaaaaaaaaaaaaaaaaaaaaaaaaaaaaatata

SEQ ID NO: 11294 - RNA, 72 nt, synthetic construct
  source 1..72: mol_type = other RNA
aaataaataaatataaataaatataaataaataaataaaaaaaaaaaaaaaataaataaataaataaataaa

SEQ ID NO: 11295 - RNA, 72 nt, synthetic construct
  source 1..72: mol_type = other RNA
aaataaataaatataaataaatataaataaataaataaataaaaaaaaaaaataaataaataaataaataaa

SEQ ID NO: 11296 - RNA, 72 nt, synthetic construct
  source 1..72: mol_type = other RNA
aaataaataaatataaataaatataaataaataaataaataaataaaaaaaataaataaataaataaataaa

SEQ ID NO: 11297 - RNA, 72 nt, synthetic construct
  source 1..72: mol_type = other RNA
aaaaaaaaaaaaaatataaataaatataaataaaaaaaaaaaaaaaaaaaaaaaaaaaaaaaaataaatata

SEQ ID NO: 11298 - RNA, 72 nt, synthetic construct
  source 1..72: mol_type = other RNA
aaaaaaaaaaaaaaaataaataaatataaataaaaaaaaaaaaaaaaaaaaaaaaaaaaaaatataaatata

SEQ ID NO: 11299 - RNA, 72 nt, synthetic construct
  source 1..72: mol_type = other RNA
aaaaaaaaaaaaaaaaaaaaaaaaaaaaaaaaaaaaaaaaaaataaataaataaataaataaatatatataa

SEQ ID NO: 11300 - RNA, 72 nt, synthetic construct
  source 1..72: mol_type = other RNA
aaaaaaaaaaaaaatataaataaatataaataaaaaaaaaaaaaaaaaaaaaaaaaaaaataaataaatata

SEQ ID NO: 11301 - RNA, 72 nt, synthetic construct
  source 1..72: mol_type = other RNA
aaaaaaaaaataaatataaataaatataaataaaaaaaaaaaaaaaaaaaaaaaaaaaaaaaaataaatata

SEQ ID NO: 11302 - RNA, 72 nt, synthetic construct
  source 1..72: mol_type = other RNA
aaaaaaaaaaaataaataaataaatataaataaaaaaaaaaaaaaaaaaaaaaaaaaaaaaatataaatata

SEQ ID NO: 11303 - RNA, 72 nt, synthetic construct
  source 1..72: mol_type = other RNA
aaaaaaaaaaaaaaaataaataaatataaataaaaaaaaaaaaaaaaaaaaaaaaaaataaatataaatata

SEQ ID NO: 11304 - RNA, 72 nt, synthetic construct
  source 1..72: mol_type = other RNA
aaaaaaaaaatataaataaataaatataaataaaaaaaaaaaaaaaaaaaaaaaaaaaaaaaaataaatata

SEQ ID NO: 11305 - RNA, 72 nt, synthetic construct
  source 1..72: mol_type = other RNA
aaaaaaaaaaaaaatataaataaatataaataaaaaaaaaaaaaaaaaaaaaaaaataaataaataaatata

SEQ ID NO: 11306 - RNA, 72 nt, synthetic construct
  source 1..72: mol_type = other RNA
aaaaaaaaaaaataaataaataaatataaataaaaaaaaaaaaaaaaaaaaaaaaaaataaatataaatata

SEQ ID NO: 11307 - RNA, 72 nt, synthetic construct
  source 1..72: mol_type = other RNA
aaaaaaaaaataaatataaataaatataaataaaaaaaaaaaaaaaaaaaaaaaaaaaaataaataaatata

SEQ ID NO: 11308 - RNA, 72 nt, synthetic construct
  source 1..72: mol_type = other RNA
aaaaaaaaaataaatataaataaatataaataaaaaaaaaaaaaaaaaaaaaaaaataaataaataaatata

SEQ ID NO: 11309 - RNA, 72 nt, synthetic construct
  source 1..72: mol_type = other RNA
aaaaaaataaataaataaataaatataaataaaaaaaaaaaaaaaaaaaaaaaaaaaatataaataaatata

SEQ ID NO: 11310 - RNA, 72 nt, synthetic construct
  source 1..72: mol_type = other RNA
aaataaataaatataaaaaaaaaaaaaaaaaaaaaaataaaaaaaaaaaaaaaaaaaaaaaaaaaaaatata

SEQ ID NO: 11311 - RNA, 72 nt, synthetic construct
  source 1..72: mol_type = other RNA
aaaaaaataaataaataaataaatataaataaaaaaaaaaaaaaaaaaaaaaaataaatataaataaatata

SEQ ID NO: 11312 - RNA, 72 nt, synthetic construct
  source 1..72: mol_type = other RNA
aaaaaaataaataaataaataaatataaataaaaaaaaaaaaaaaaaaaataaataaatataaataaatata

SEQ ID NO: 11313 - RNA, 72 nt, synthetic construct
  source 1..72: mol_type = other RNA
aaataaataaaaaaaaaaaaaaaaaaaaaaaaaaaaaaaaaaaaataaataaatataaataaaaaaaatata

SEQ ID NO: 11314 - RNA, 72 nt, synthetic construct
  source 1..72: mol_type = other RNA
aaaaaataaataaataaataaaaaaaaaaaaaaaaatataaataaataaataaataaatataaataaatata

SEQ ID NO: 11315 - RNA, 72 nt, synthetic construct
  source 1..72: mol_type = other RNA
aaaaaataaataaataaatataaaaaaaaaaaaaaaaataaataaataaataaataaatataaataaatata

SEQ ID NO: 11316 - RNA, 72 nt, synthetic construct
  source 1..72: mol_type = other RNA
aaaaaaataaataaataaataaatataaataaataaaaaaaaaaaaaaaataaataaatataaataaatata

SEQ ID NO: 11317 - RNA, 73 nt, synthetic construct
  source 1..73: mol_type = other RNA
aaaaaaaaaaaaaaaaaaaaaaaaaaaaaaaaaaaaaaaaaaaaaaaaaaaaaaaaaaaaaaaaaaaaaataa

SEQ ID NO: 11318 - RNA, 73 nt, synthetic construct
  source 1..73: mol_type = other RNA
aaaaaaaaaaaaaaaaaaaaaaaaaaaaataaataaataaatataaataaataaataaataaataaatatata

SEQ ID NO: 11319 - RNA, 73 nt, synthetic construct
  source 1..73: mol_type = other RNA
aaataaataaatataaaaaaaaaaaaaaaaaaaaaaaaaaaaaaaaataaataaataaataaataaatatata

SEQ ID NO: 11320 - RNA, 73 nt, synthetic construct
  source 1..73: mol_type = other RNA
aaaaaaaaaaaaaaaaaaaaaataaataaatataaataaataaataaataaataaataaataaataaatataa

SEQ ID NO: 11321 - RNA, 73 nt, synthetic construct
  source 1..73: mol_type = other RNA
aaaaaaaaaaaaaaaaaaaaaataaatataaataaataaataaataaataaataaataaataaataaatataa

SEQ ID NO: 11322 - RNA, 73 nt, synthetic construct
  source 1..73: mol_type = other RNA
aaataaataaatataaataaaaaaaaaaaaaaaaaaaaaaaaaaaaataaataaataaataaataaatatata

SEQ ID NO: 11323 - RNA, 73 nt, synthetic construct
  source 1..73: mol_type = other RNA
aaataaataaatataaaaaaaaaaaaaaaaaaaaaaaaaaaaaaaaaaaaaaaaaaaaaaaaaaaaaaaatat

SEQ ID NO: 11324 - RNA, 73 nt, synthetic construct
  source 1..73: mol_type = other RNA
aaataaataaatataaataaaaaaaaaaaaaaaaaaaaaaaaaaaaaaaaaaaaaaaaaaaaaaaaaaaatat

SEQ ID NO: 11325 - RNA, 73 nt, synthetic construct
  source 1..73: mol_type = other RNA
aaataaatataaataaataaaaaaaaaaaaaaaaaaaaaaaaaaaaaaaaaaaaaaaaaaaaaaaaaaaatat

SEQ ID NO: 11326 - RNA, 73 nt, synthetic construct
  source 1..73: mol_type = other RNA
aaaaaaaaaaaaaaaaaaaaaaaaaaaaaaaaaaaaaaaaaaaaaaaaaaaaaaataaaaaaaaaaaaaataa

SEQ ID NO: 11327 - RNA, 73 nt, synthetic construct
  source 1..73: mol_type = other RNA
aaaaaaaaaaaataaaaaaaaaaaaaaaaaaaaaaaaaaaaaaaaaaaaaaaaaaaaaaaaaaaaaaaaataa

SEQ ID NO: 11328 - RNA, 73 nt, synthetic construct
  source 1..73: mol_type = other RNA
aaataaaaaaaaaaaaaaaaaaaaaaaataaaaaaaaaaaaaaaaaaaataaataaataaataaataaatata

SEQ ID NO: 11329 - RNA, 73 nt, synthetic construct
  source 1..73: mol_type = other RNA
aaaaaaaaaaaaaaaaaaaaaataaatataaataaataaataaataaataaataaataaataaataaatatat

SEQ ID NO: 11330 - RNA, 73 nt, synthetic construct
  source 1..73: mol_type = other RNA
aaaaaaaaaaaaaaaaaaaaaataaataaatataaataaataaataaataaataaataaataaataaatatat

SEQ ID NO: 11331 - RNA, 73 nt, synthetic construct
  source 1..73: mol_type = other RNA
aaaaaaaaaaaataaataaaaaaaaaaaaaaaaaaaaaaaaaaaaaaaaaaaaaaaaaaaaaaaaaaaaataa

SEQ ID NO: 11332 - RNA, 73 nt, synthetic construct
  source 1..73: mol_type = other RNA
aaataaaaaaaaaaaaaaaaaaaataaataaaaaaaaaaaaaaaaaaaataaataaataaataaataaatata

SEQ ID NO: 11333 - RNA, 73 nt, synthetic construct
  source 1..73: mol_type = other RNA
aaaaaaaaaaaataaataaaaaaaaaaaaaaaaaaaaaaaaaaaaaaaaaaaaaaaaaaaaaaaaataaataa

SEQ ID NO: 11334 - RNA, 73 nt, synthetic construct
  source 1..73: mol_type = other RNA
aaataaataaaaaaaaaaaaaaaataaataaaaaaaaaaaaaaaaaaaataaataaataaataaataaatata

SEQ ID NO: 11335 - RNA, 73 nt, synthetic construct
  source 1..73: mol_type = other RNA
aaataaaaaaaaaaaaaaaaaaaataaataaaaaaaaaaaaaaaataaataaataaataaataaataaatata

SEQ ID NO: 11336 - RNA, 73 nt, synthetic construct
  source 1..73: mol_type = other RNA
aaataaaaaaaaaaaaaaaaaaaataaataaataaaaaaaaaaaaaaaataaataaataaataaataaatata

SEQ ID NO: 11337 - RNA, 73 nt, synthetic construct
  source 1..73: mol_type = other RNA
aaaaaaaaaaaaaaaaaaaaaaaaaaaaaaaaaaaaaaaaaaaaaaaaaataaaaaaaaaaaaaaaaaataaa

SEQ ID NO: 11338 - RNA, 73 nt, synthetic construct
  source 1..73: mol_type = other RNA
aaaaaaaaaaaaaaaaaaaaaaaaaaaaaaaaataaataaaaaaaaaaaaaaaaaaaaaaaataaataaataa

SEQ ID NO: 11339 - RNA, 73 nt, synthetic construct
  source 1..73: mol_type = other RNA
aaataaataaaaaaaaaaaaaaaataaataaaaaaaaaaaaaaaataaataaataaataaataaataaatata

SEQ ID NO: 11340 - RNA, 73 nt, synthetic construct
  source 1..73: mol_type = other RNA
aaataaaaaaaaaaaaaaaaaaaataaataaaaaaaaaaaataaataaataaataaataaataaataaatata

SEQ ID NO: 11341 - RNA, 73 nt, synthetic construct
  source 1..73: mol_type = other RNA
aaataaataaataaaaaaaaaaaataaataaaaaaaaaaaaaaaaaaaataaataaataaataaataaatata

SEQ ID NO: 11342 - RNA, 73 nt, synthetic construct
  source 1..73: mol_type = other RNA
aaataaataaaaaaaaaaaaaaaataaataaataaaaaaaaaaaaaaaataaataaataaataaataaatata

SEQ ID NO: 11343 - RNA, 73 nt, synthetic construct
  source 1..73: mol_type = other RNA
aaataaaaaaaaaaaaaaaaaaaataaataaataaaaaaaaaaaataaataaataaataaataaataaatata

SEQ ID NO: 11344 - RNA, 73 nt, synthetic construct
  source 1..73: mol_type = other RNA
aaaaaaaaaaaaaaaaaaaaaaaaaaaaaaaaaaaaaaaaaaaaaaaaaataaaaaaaaaaaaaataaataaa

SEQ ID NO: 11345 - RNA, 73 nt, synthetic construct
  source 1..73: mol_type = other RNA
aaaaaaaaaaaaaaaaaaaaaaaaaaaaaaaaaaaaaaaaaaaaaataaataaaaaaaaaaaaaaaaaataaa

SEQ ID NO: 11346 - RNA, 73 nt, synthetic construct
  source 1..73: mol_type = other RNA
aaataaataaaaaaaaaaaaaaaataaataaaaaaaaaaaataaataaataaataaataaataaataaatata

SEQ ID NO: 11347 - RNA, 73 nt, synthetic construct
  source 1..73: mol_type = other RNA
aaataaataaataaaaaaaaaaaataaataaaaaaaaaaaaaaaataaataaataaataaataaataaatata

SEQ ID NO: 11348 - RNA, 73 nt, synthetic construct
  source 1..73: mol_type = other RNA
aaataaaaaaaaaaaaaaaaaaaataaataaataaataaataaaaaaaataaataaataaataaataaatata

SEQ ID NO: 11349 - RNA, 73 nt, synthetic construct
  source 1..73: mol_type = other RNA
aaataaaaaaaaaaaaaaaaaaaataaataaaaaaaataaataaataaataaataaataaataaataaatata

SEQ ID NO: 11350 - RNA, 73 nt, synthetic construct
  source 1..73: mol_type = other RNA
aaataaataaaaaaaaaaaaaaaataaataaataaaaaaaaaaaataaataaataaataaataaataaatata

SEQ ID NO: 11351 - RNA, 73 nt, synthetic construct
  source 1..73: mol_type = other RNA
aaataaaaaaaaaaaaaaaaaaaataaataaataaataaaaaaaataaataaataaataaataaataaatata

SEQ ID NO: 11352 - RNA, 73 nt, synthetic construct
  source 1..73: mol_type = other RNA
aaataaataaataaaaaaaaaaaataaataaataaaaaaaaaaaaaaaataaataaataaataaataaatata

SEQ ID NO: 11353 - RNA, 73 nt, synthetic construct
  source 1..73: mol_type = other RNA
aaataaaaaaaaaaaaaaaaaaaataaataaataaaaaaaataaataaataaataaataaataaataaatata

SEQ ID NO: 11354 - RNA, 73 nt, synthetic construct
  source 1..73: mol_type = other RNA
aaataaataaaaaaaaaaaaaaaataaataaataaataaaaaaaaaaaataaataaataaataaataaatata

SEQ ID NO: 11355 - RNA, 73 nt, synthetic construct
  source 1..73: mol_type = other RNA
aaaaaaaaaaaaaaaaaaaaaaaaaaaaaaaaaaaaaaaaaaaaaataaataaaaaaaaaaaaaataaataaa

SEQ ID NO: 11356 - RNA, 73 nt, synthetic construct
  source 1..73: mol_type = other RNA
aaataaataaaaaaaaaaaaaaaataaataaataaataaataaaaaaaataaataaataaataaataaatata

SEQ ID NO: 11357 - RNA, 73 nt, synthetic construct
  source 1..73: mol_type = other RNA
aaataaataaataaaaaaaaaaaataaataaaaaaaaaaaataaataaataaataaataaataaataaatata

SEQ ID NO: 11358 - RNA, 73 nt, synthetic construct
  source 1..73: mol_type = other RNA
aaataaataaaaaaaaaaaaaaaataaataaaaaaaataaataaataaataaataaataaataaataaatata

SEQ ID NO: 11359 - RNA, 73 nt, synthetic construct
  source 1..73: mol_type = other RNA
aaataaaaaaaaaaaaaaaaaaaataaataaataaataaataaaataaataaataaataaataaataaatata

SEQ ID NO: 11360 - RNA, 73 nt, synthetic construct
  source 1..73: mol_type = other RNA
aaataaaaaaaaaaaaaaaaaaaataaataaataaataaaataaataaataaataaataaataaataaatata

SEQ ID NO: 11361 - RNA, 73 nt, synthetic construct
  source 1..73: mol_type = other RNA
aaataaataaaaaaaaaaaaaaaataaataaataaaaaaaataaataaataaataaataaataaataaatata

SEQ ID NO: 11362 - RNA, 73 nt, synthetic construct
  source 1..73: mol_type = other RNA
aaataaataaaaaaaaaaaaaaaataaataaataaataaaaaaaataaataaataaataaataaataaatata

SEQ ID NO: 11363 - RNA, 73 nt, synthetic construct
  source 1..73: mol_type = other RNA
aaataaataaataaaaaaaaaaaataaataaataaaaaaaaaaaataaataaataaataaataaataaatata

SEQ ID NO: 11364 - RNA, 73 nt, synthetic construct
  source 1..73: mol_type = other RNA
aaataaataaataaaaaaaaaaaataaataaataaataaaaaaaaaaaataaataaataaataaataaatata

SEQ ID NO: 11365 - RNA, 73 nt, synthetic construct
  source 1..73: mol_type = other RNA
aaataaataaataaaaaaaaaaaataaataaataaataaataaaaaaaataaataaataaataaataaatata

SEQ ID NO: 11366 - RNA, 73 nt, synthetic construct
  source 1..73: mol_type = other RNA
aaataaataaataaaaaaaaaaaataaataaaaaaaataaataaataaataaataaataaataaataaatata

SEQ ID NO: 11367 - RNA, 73 nt, synthetic construct
  source 1..73: mol_type = other RNA
aaataaataaaaaaaaaaaaaaaataaataaataaataaataaaataaataaataaataaataaataaatata

SEQ ID NO: 11368 - RNA, 73 nt, synthetic construct
  source 1..73: mol_type = other RNA
aaataaataaaaaaaaaaaaaaaataaataaataaataaaataaataaataaataaataaataaataaatata

SEQ ID NO: 11369 - RNA, 73 nt, synthetic construct
  source 1..73: mol_type = other RNA
aaataaataaataaaaaaaaaaaataaataaataaataaaaaaaataaataaataaataaataaataaatata

SEQ ID NO: 11370 - RNA, 73 nt, synthetic construct
  source 1..73: mol_type = other RNA
aaataaataaataaaaaaaaaaaataaataaataaaaaaaataaataaataaataaataaataaataaatata

SEQ ID NO: 11371 - RNA, 73 nt, synthetic construct
  source 1..73: mol_type = other RNA
aaataaataaataaaaaaaaaaaataaataaataaataaataaaataaataaataaataaataaataaatata

SEQ ID NO: 11372 - RNA, 73 nt, synthetic construct
  source 1..73: mol_type = other RNA
aaataaataaataaaaaaaaaaaataaataaataaaataaataaataaataaataaataaataaataaatata

SEQ ID NO: 11373 - RNA, 73 nt, synthetic construct
  source 1..73: mol_type = other RNA
aaataaataaataaaaaaaaaaaataaataaataaataaaataaataaataaataaataaataaataaatata

SEQ ID NO: 11374 - RNA, 73 nt, synthetic construct
  source 1..73: mol_type = other RNA
aaaaaaaaaaaataaaaaaaaaaaaaaaaaaaaaaaaaaaaaaaaaaaaaaaaaaaaaaaaaaaaaaaaatat

SEQ ID NO: 11375 - RNA, 73 nt, synthetic construct
  source 1..73: mol_type = other RNA
aaaaaaaaaaaataaataaaaaaaaaaaaaaaaaaaaaaaaaaaaaaaaaaaaaaaaaaaaaaaaaaaaatat

SEQ ID NO: 11376 - RNA, 73 nt, synthetic construct
  source 1..73: mol_type = other RNA
aaaaaaaaaaaataaataaaaaaaaaaaaaaaaaaaaaaaaaaaaaaaaaaaaaaaaaaaaaaaaataaatat

SEQ ID NO: 11377 - RNA, 73 nt, synthetic construct
  source 1..73: mol_type = other RNA
aaaaaaaaaaaaaaaaaaaaaaaaaaaaaaaaaaaaaaaaaaaaaaaaaaaaaaaaaaaaaaaaaaaaaatac

SEQ ID NO: 11378 - RNA, 73 nt, synthetic construct
  source 1..73: mol_type = other RNA
aaaaaaaaaaaaaaaaaaaatataaataaatataaataaataaataaataaataaataaataaataaatataa

SEQ ID NO: 11379 - RNA, 73 nt, synthetic construct
  source 1..73: mol_type = other RNA
aaaaaaaaaaaaaaaaaaaatataaatataaataaataaataaataaataaataaataaataaataaatataa

SEQ ID NO: 11380 - RNA, 73 nt, synthetic construct
  source 1..73: mol_type = other RNA
aaaaaaaaaaaaaaaaaaaaaaaaaaaaaaaaataaataaatataaatatataaataaataaataaatatata

SEQ ID NO: 11381 - RNA, 73 nt, synthetic construct
  source 1..73: mol_type = other RNA
aaaaaaaaaaaaaaaaaaaaaaaaaaaaataaataaataaatataaatatataaataaataaataaatatata

SEQ ID NO: 11382 - RNA, 73 nt, synthetic construct
  source 1..73: mol_type = other RNA
aaaaaaaaaaaaaaaaaaaaaaaaaaaaataaatatataaatataaataaataaataaataaataaatatata

SEQ ID NO: 11383 - RNA, 73 nt, synthetic construct
  source 1..73: mol_type = other RNA
aaataaatataaataaatataaataaataaataaaaaaaaaaaaaaaaaaaaaaaaaaaaaaaaaaaaaatat

SEQ ID NO: 11384 - RNA, 73 nt, synthetic construct
  source 1..73: mol_type = other RNA
aaatataaataaataaatataaataaataaataaaaaaaaaaaaaaaaaaaaaaaaaaaaaaaaaaaaaatat

SEQ ID NO: 11385 - RNA, 73 nt, synthetic construct
  source 1..73: mol_type = other RNA
aaatataaataaataaatataaataaataaataaataaaaaaaaaaaaaaaaaaaaaaaaaaaaaaaaaatat

SEQ ID NO: 11386 - RNA, 73 nt, synthetic construct
  source 1..73: mol_type = other RNA
aaataaatataaataaatataaataaataaataaataaaaaaaaaaaaaaaaaaaaaaaaaaaaaaaaaatat

SEQ ID NO: 11387 - RNA, 73 nt, synthetic construct
  source 1..73: mol_type = other RNA
aaatataaataaataaatataaataaataaataaaaaaaaaaaaaaaaaaaaaaaaaaaaaaaaaataaatat

SEQ ID NO: 11388 - RNA, 73 nt, synthetic construct
  source 1..73: mol_type = other RNA
aaaaaaaaaaaaaaaaaaaaaaataaatataaataaataaataaataaatataaataaaaaaaaataaatata

SEQ ID NO: 11389 - RNA, 73 nt, synthetic construct
  source 1..73: mol_type = other RNA
aaaaaaaaaaaaaaaaaaaaaaataaatataaataaataaataaataaatataaataaataaaaataaatata

SEQ ID NO: 11390 - RNA, 73 nt, synthetic construct
  source 1..73: mol_type = other RNA
aaataaataaatataaataaaaaaaaaaaaaaaaaaaaaaaaaaaaaaaaaaaaaaaaaaaaaataaatatat

SEQ ID NO: 11391 - RNA, 73 nt, synthetic construct
  source 1..73: mol_type = other RNA
aaaaaaaaaaaaaaaaaaaaaaaaaaaaaaaaaaaaaaaaaaaaaaaaaaaaaaataaaaaaaaaaaatataa

SEQ ID NO: 11392 - RNA, 73 nt, synthetic construct
  source 1..73: mol_type = other RNA
aaaaaaaaaaaataaaaaaaaaaaaaaaaaaaaaaaaaaaaaaaaaaaaaaaaaaaaaaaaaaaaaaatataa

SEQ ID NO: 11393 - RNA, 73 nt, synthetic construct
  source 1..73: mol_type = other RNA
aaaaaaaaaaaaaaaaaaaatataaataaatataaataaataaataaataaataaataaataaataaatatat

SEQ ID NO: 11394 - RNA, 73 nt, synthetic construct
  source 1..73: mol_type = other RNA
aaaaaaaaaaaaaaaaaaaatataaatataaataaataaataaataaataaataaataaataaataaatatat

SEQ ID NO: 11395 - RNA, 73 nt, synthetic construct
  source 1..73: mol_type = other RNA
aaaaaaaaaatataaataaaaaaaaaaaaaaaaaaaaaaaaaaaaaaaaaaaaaaaaaaaaaaaaaaaaataa

SEQ ID NO: 11396 - RNA, 73 nt, synthetic construct
  source 1..73: mol_type = other RNA
aaataaaaaaaaaaaaaaaaaaaataaataaaaaaaaaaaaaaaaaatataaataaataaataaataaatata

SEQ ID NO: 11397 - RNA, 73 nt, synthetic construct
  source 1..73: mol_type = other RNA
aaataaaaaaaaaaaaaaaaaatataaataaaaaaaaaaaaaaaaaaaataaataaataaataaataaatata

SEQ ID NO: 11398 - RNA, 73 nt, synthetic construct
  source 1..73: mol_type = other RNA
aaaaaaaaaatataaataaaaaaaaaaaaaaaaaaaaaaaaaaaaaaaaaaaaaaaaaaaaaaaaataaataa

SEQ ID NO: 11399 - RNA, 73 nt, synthetic construct
  source 1..73: mol_type = other RNA
aaataaataaaaaaaaaaaaaaaataaataaaaaaaaaaaaaaaaaatataaataaataaataaataaatata

SEQ ID NO: 11400 - RNA, 73 nt, synthetic construct
  source 1..73: mol_type = other RNA
aaataaaaaaaaaaaaaaaaaaaataaataaataaaaaaaaaaaaaatataaataaataaataaataaatata

SEQ ID NO: 11401 - RNA, 73 nt, synthetic construct
  source 1..73: mol_type = other RNA
aaaaaaaaaaaaaaaaaaaaaaaaaaaaaaaaaaaaaaaaaaaaaaaaaataaaaaaaaaaaaaaaatataaa

SEQ ID NO: 11402 - RNA, 73 nt, synthetic construct
  source 1..73: mol_type = other RNA
aaaaaaaaaaaaaaaaaaaaaaaaaaaaaaaaataaatataaaaaaaaaaaaaaaaaaaaaataaataaataa

SEQ ID NO: 11403 - RNA, 73 nt, synthetic construct
  source 1..73: mol_type = other RNA
aaaaaaaaaaaaaaaaaaaaaaaaaaaaaaaaatataaataaaaaaaaaaaaaaaaaaaaaataaataaataa

SEQ ID NO: 11404 - RNA, 73 nt, synthetic construct
  source 1..73: mol_type = other RNA
aaataaataaataaaaaaaaaaaataaataaaaaaaaaaaaaaaaaatataaataaataaataaataaatata

SEQ ID NO: 11405 - RNA, 73 nt, synthetic construct
  source 1..73: mol_type = other RNA
aaataaaaaaaaaaaaaaaaaaaataaataaataaataaaaaaaaaatataaataaataaataaataaatata

SEQ ID NO: 11406 - RNA, 73 nt, synthetic construct
  source 1..73: mol_type = other RNA
aaataaataaaaaaaaaaaaaaaataaataaataaaaaaaaaaaaaatataaataaataaataaataaatata

SEQ ID NO: 11407 - RNA, 73 nt, synthetic construct
  source 1..73: mol_type = other RNA
aaaaaaaaaaaaaaaaaaaaaaaaaaaaaaaaaaaaaaaaaaaaaaaaaataaaaaaaaaaaataaatataaa

SEQ ID NO: 11408 - RNA, 73 nt, synthetic construct
  source 1..73: mol_type = other RNA
aaaaaaaaaaaaaaaaaaaaaaaaaaaaaaaaaaaaaaaaaaaaaaaaaataaaaaaaaaaaatataaataaa

SEQ ID NO: 11409 - RNA, 73 nt, synthetic construct
  source 1..73: mol_type = other RNA
aaaaaaaaaaaaaaaaaaaaaaaaaaaaaaaaaaaaaaaaaaaaaataaataaaaaaaaaaaaaaaatataaa

SEQ ID NO: 11410 - RNA, 73 nt, synthetic construct
  source 1..73: mol_type = other RNA
aaaaaaaaaaaaaaaaaaaaaaaaaaaaataaataaatataaaaaaaaaaaaaaaaaaaaaataaataaataa

SEQ ID NO: 11411 - RNA, 73 nt, synthetic construct
  source 1..73: mol_type = other RNA
aaaaaaaaaaaaaaaaaaaaaaaaaaaaataaatataaataaaaaaaaaaaaaaaaaaaaaataaataaataa

SEQ ID NO: 11412 - RNA, 73 nt, synthetic construct
  source 1..73: mol_type = other RNA
aaataaatataaaaaaaaaaaaaataaataaaaaaaaaaaataaataaataaataaataaataaataaatata

SEQ ID NO: 11413 - RNA, 73 nt, synthetic construct
  source 1..73: mol_type = other RNA
aaataaataaaaaaaaaaaaaaaataaataaataaataaaaaaaaaatataaataaataaataaataaatata

SEQ ID NO: 11414 - RNA, 73 nt, synthetic construct
  source 1..73: mol_type = other RNA
aaataaataaataaaaaaaaaaaataaataaataaaaaaaaaaaaaatataaataaataaataaataaatata

SEQ ID NO: 11415 - RNA, 73 nt, synthetic construct
  source 1..73: mol_type = other RNA
aaataaaaaaaaaaaaaaaaaaaataaataaataaataaataaaaaatataaataaataaataaataaatata

SEQ ID NO: 11416 - RNA, 73 nt, synthetic construct
  source 1..73: mol_type = other RNA
aaaaaaaaaaaaaaaaaaaaaaaaaaaaaaaaaaaaaaaaaaaaaaaaaataaaaaaaataaataaatataaa

SEQ ID NO: 11417 - RNA, 73 nt, synthetic construct
  source 1..73: mol_type = other RNA
aaaaaaaaaaaaaaaaaaaaaaaaaaaaaaaaaaaaaaaaaaaaaaaaaataaaaaaaataaatataaataaa

SEQ ID NO: 11418 - RNA, 73 nt, synthetic construct
  source 1..73: mol_type = other RNA
aaaaaaaaaaaaaaaaaaaaaaaaaaaaaaaaaaaaaaaaaaaaaataaataaaaaaaaaaaataaatataaa

SEQ ID NO: 11419 - RNA, 74 nt, synthetic construct
  source 1..74: mol_type = other RNA
aaaaaaaaaaaaaaaaaaaaaaaaaaaaaaaaaaaaaaaaaaaaaaaaaaaaaaaaaaaaaaaaaaaaatataa

SEQ ID NO: 11420 - RNA, 74 nt, synthetic construct
  source 1..74: mol_type = other RNA
aaaaaaaaaaaaaaaaaaaaaaaaaaaaaaaaaaaaaaaaaaaaaaaaaaaaaaaaaaaaaaaaaaatatataa

SEQ ID NO: 11421 - RNA, 74 nt, synthetic construct
  source 1..74: mol_type = other RNA
aaaaaaaaaaaaaaaaaaaaaaaaaaaaaaaaaaaaaaaaaaaaaaaaaaaaaaaaaaaaaaaaaaaaatatac

SEQ ID NO: 11422 - RNA, 74 nt, synthetic construct
  source 1..74: mol_type = other RNA
aaaaaaaaaaaaaaaaaaaaaaaaaaaaaaaaaaaaataaaaaaaaaaaaaaaaaaaaaataaataaatatata

SEQ ID NO: 11423 - RNA, 74 nt, synthetic construct
  source 1..74: mol_type = other RNA
aaaaaaaaaaaaaaaaaaaaaaaaaaaaaaaaataaataaaaaaaaaaaaaaaaaaaaaataaataaatatata

SEQ ID NO: 11424 - RNA, 74 nt, synthetic construct
  source 1..74: mol_type = other RNA
aaaaaaaaaaaaaaaaaaaaaaaaaaaaaaaaaaaaataaataaaaaaaaaaaaaaaaaataaataaatatata

SEQ ID NO: 11425 - RNA, 74 nt, synthetic construct
  source 1..74: mol_type = other RNA
aaaaaaaaaaaaaaaaaaaaaaaaaaaaaaaaataaataaataaaaaaaaaaaaaaaaaataaataaatatata

SEQ ID NO: 11426 - RNA, 74 nt, synthetic construct
  source 1..74: mol_type = other RNA
aaaaaaaaaaaaaaaaaaaaaaaaaaaaaaaaaaaaataaaaaaaaaaaaaaaaaaaaaaaaaaaataaataaa

SEQ ID NO: 11427 - RNA, 74 nt, synthetic construct
  source 1..74: mol_type = other RNA
aaaaaaaaaaaaaaaaaaaaaaaaaaaaaaaaaaaaaaaaaaaaaaaaataaaaaaaaaaaaaaaataaataaa

SEQ ID NO: 11428 - RNA, 74 nt, synthetic construct
  source 1..74: mol_type = other RNA
aaaaaaaaaaaaaaaaaaaaaaaaaaaaaaaaataaataaaaaaaaaaaaaaaaaaaaaaaaaaaataaataaa

SEQ ID NO: 11429 - RNA, 74 nt, synthetic construct
  source 1..74: mol_type = other RNA
aaaaaaaaaaaaaaaaaaaaaaaaaaaaaaaaaaaaataaaaaaaaaaaaaaaaaaaaaaaataaataaataaa

SEQ ID NO: 11430 - RNA, 74 nt, synthetic construct
  source 1..74: mol_type = other RNA
aaaaaaaaaaaaaaaaaaaaaaaaaaaaaaaaaaaaaaaaaaaaaaaaataaataaaaaaaaaaaataaataaa

SEQ ID NO: 11431 - RNA, 74 nt, synthetic construct
  source 1..74: mol_type = other RNA
aaaaaaaaaaaaaaaaaaaaaaaaaaaaaaaaataaataaataaaaaaaaaaaaaaaaaaaaaaaataaataaa

SEQ ID NO: 11432 - RNA, 74 nt, synthetic construct
  source 1..74: mol_type = other RNA
aaaaaaaaaaaaaaaaaaaaaaaaaaaaaaaaaaaaaaaaaaaaaaaaataaataaaaaaaataaataaataaa

SEQ ID NO: 11433 - RNA, 74 nt, synthetic construct
  source 1..74: mol_type = other RNA
aaaaaaaaaaaaaaaaaaaaaaaaaaaaaaaaaaaaaaaaaaaaaaaaataaataaaataaataaataaataaa

SEQ ID NO: 11434 - RNA, 74 nt, synthetic construct
  source 1..74: mol_type = other RNA
aaaaaaaaaataaataaataaataaatataaataaataaataaataaatataaataaataaatataaatatata

SEQ ID NO: 11435 - RNA, 74 nt, synthetic construct
  source 1..74: mol_type = other RNA
aaaaaaaaaaaaaataaaaaaaaaaaaaaaaaaaaaaaaaaaaaaaaaaaaaaaaaaaaaaaaaaaaaaaaata

SEQ ID NO: 11436 - RNA, 74 nt, synthetic construct
  source 1..74: mol_type = other RNA
aaaaaaaaaataaataaaaaaaaaaaaaaaaaaaaaaaaaaaaaaaaaaaaaaaaaaaaaaaaaaaaaaaaata

SEQ ID NO: 11437 - RNA, 74 nt, synthetic construct
  source 1..74: mol_type = other RNA
aaaaaaaaaataaataaaaaaaaaaaaaaaaaaaaaaaaaaaaaaaaaaaaaaaaaaaaaaaaaaaaataaata

SEQ ID NO: 11438 - RNA, 74 nt, synthetic construct
  source 1..74: mol_type = other RNA
aaaaaaaaaaaaaaaaaaaaaaaaaaaaaaaaaaaaataaaaaaaaaaaaaaaaaaaaaataaataaataaata

SEQ ID NO: 11439 - RNA, 74 nt, synthetic construct
  source 1..74: mol_type = other RNA
aaaaaaaaaataaataaataaaaaaaaaaaaaaaaaaaaaaaaaaaaaaaaaaaaaaaaaaaaaaaaataaata

SEQ ID NO: 11440 - RNA, 74 nt, synthetic construct
  source 1..74: mol_type = other RNA
aaaaaaaaaaaaaaaaaaaaaaaaaaaaaaaaataaataaaaaaaaaaaaaaaaaaaaaataaataaataaata

SEQ ID NO: 11441 - RNA, 74 nt, synthetic construct
  source 1..74: mol_type = other RNA
aaaaaaaaaaaaaaaaaaaaaaaaaaaaaaaaataaataaataaaaaaaaaaaaaaaaaataaataaataaata

SEQ ID NO: 11442 - RNA, 74 nt, synthetic construct
  source 1..74: mol_type = other RNA
aaaaaaaaaaaaaaaaaaaaaaaaaaataaaaaaaaaaaaaaaaaaaaaaaaaaaaaaaaaaaaaaaaatataa

SEQ ID NO: 11443 - RNA, 74 nt, synthetic construct
  source 1..74: mol_type = other RNA
aaaaaaaaaaaaaaaaaaaaaaaaaaaaaaaaaaaaaaaaaaaaaaaaataaaaaaaaaaaaaaaaaaatataa

SEQ ID NO: 11444 - RNA, 74 nt, synthetic construct
  source 1..74: mol_type = other RNA
aaaaaaaaaaaaaaaaaaaaaaaaaaaaaaaaaaaaaaaaaaaaaaaataaaaaaaaaaaaaaaaaaaatataa

SEQ ID NO: 11445 - RNA, 74 nt, synthetic construct
  source 1..74: mol_type = other RNA
aaaaaaaaaaaaaaaaaaaaaaaaaaaaaaaaaaaaaaataaaaaaaaaaaaaaaaaaaaaaaaaaaaatataa

SEQ ID NO: 11446 - RNA, 74 nt, synthetic construct
  source 1..74: mol_type = other RNA
aaaaaaaaaaaaaaaaaaaaaaaaaaaaaaataaaaaaaaaaaaaaaaaaaaaaaaaaaaaaaaaaaaatataa

SEQ ID NO: 11447 - RNA, 74 nt, synthetic construct
  source 1..74: mol_type = other RNA
aaaaaaaaaaaataaaaaaaaaaaaaaaaaaaaaaaaaaaaaaaaaaaaaaaaaaaaaaaaaaaaaaaatataa

SEQ ID NO: 11448 - RNA, 74 nt, synthetic construct
  source 1..74: mol_type = other RNA
aaaaaaaaaaaaaaaaaaaaaaaaaaaaaaaaaaaaaaaaaaaaaaaaaaaaaaaaaaaaaaaataaaatataa

SEQ ID NO: 11449 - RNA, 74 nt, synthetic construct
  source 1..74: mol_type = other RNA
aaaaaaaaaaaaaaaaaaaaaaaataaaaaaaaaaaaaaaaaaaaaaaaaaaaaaaaaaaaaaaaaaaatataa

SEQ ID NO: 11450 - RNA, 74 nt, synthetic construct
  source 1..74: mol_type = other RNA
aaaaaaaaaaaaataaaaaaaaaaaaaaaaaaaaaaaaaaaaaaaaaaaaaaaaaaaaaaaaaaaaaaatataa

SEQ ID NO: 11451 - RNA, 74 nt, synthetic construct
  source 1..74: mol_type = other RNA
aaaaaaaaaaaaaaaaaaaaaaaaaaaaaaaaaaaaaaaaaaaaaaaaaaaaaaaaaaaataaaaaaaatataa

SEQ ID NO: 11452 - RNA, 74 nt, synthetic construct
  source 1..74: mol_type = other RNA
aaaaaaaaaaaaaaaaaaaaaaaaaatataaataaataaaaaaaaaaaaaaaaaaaaaaaaaaaaaaatatata

SEQ ID NO: 11453 - RNA, 74 nt, synthetic construct
  source 1..74: mol_type = other RNA
aaaaaaaaaataaaaaaaaaaaaaaaaaaaaaaaaaaaaaaaaaaataaataaataaataaatataaatatata

SEQ ID NO: 11454 - RNA, 74 nt, synthetic construct
  source 1..74: mol_type = other RNA
aaaaaaaaaataaaaaaaaaaaaaaaaaaaaaaaaaaaaaaaaaaataaataaataaataaatatataaatata

SEQ ID NO: 11455 - RNA, 74 nt, synthetic construct
  source 1..74: mol_type = other RNA
aaaaaaaaaaaaaaaaaaaaaaaaaaaaaaaaaaaaataaaaaaaaaaaaaaaaaaaaaaaaaatataaataaa

SEQ ID NO: 11456 - RNA, 74 nt, synthetic construct
  source 1..74: mol_type = other RNA
aaaaaaaaaataaaaaaaaaaaaaaaaaaaaaaaaaaaaaaataaataaataaataaataaatataaatatata

SEQ ID NO: 11457 - RNA, 74 nt, synthetic construct
  source 1..74: mol_type = other RNA
aaaaaaaaaataaaaaaaaaaaaaaaaaaaaaaaaaaaaaaataaataaataaataaataaatatataaatata

SEQ ID NO: 11458 - RNA, 74 nt, synthetic construct
  source 1..74: mol_type = other RNA
aaaaaaaaaaaaaaaaaaaaaaaaaaaaaaaaataaataaaaaaaaaaaaaaaaaaaaaaaaaatataaataaa

SEQ ID NO: 11459 - RNA, 74 nt, synthetic construct
  source 1..74: mol_type = other RNA
aaaaaaaaaaaaaaaaaaaaaaaaaaaaaaaaaaaaaaaaaataaataaataaaaaaaaaaaaataaatataaa

SEQ ID NO: 11460 - RNA, 74 nt, synthetic construct
  source 1..74: mol_type = other RNA
aaaaaaaaaaaaaaaaaaaaaaaaaaaaaaaaataaataaataaaaaaaaaaaaaaaaaaaaaatataaataaa

SEQ ID NO: 11461 - RNA, 74 nt, synthetic construct
  source 1..74: mol_type = other RNA
aaataaaaaaaaaaaaaaaaaaaaaaaaaaaaaaaaaaaaaaaaaaaaaaaaaaaaaaaataaaaaataaataa

SEQ ID NO: 11462 - RNA, 74 nt, synthetic construct
  source 1..74: mol_type = other RNA
aaaaaaaaaaaaaaaaaaaaaaaaaaaaaaaaaaaaaaaaaataaataaataaataaaaaaaaataaatataaa

SEQ ID NO: 11463 - RNA, 74 nt, synthetic construct
  source 1..74: mol_type = other RNA
aaataaaaaaaaaaaaaaaaaaaaaaaaaaaaaaaaaaaaaaaaaaaaaaaaaaaataaataaaaaataaataa

SEQ ID NO: 11464 - RNA, 74 nt, synthetic construct
  source 1..74: mol_type = other RNA
aaataaataaataaataaaaaaaaaaaaaaaaaaaaaaaaaaaaaaaaaaaaaaaaataaaaaaaaaaaaataa

SEQ ID NO: 11465 - RNA, 74 nt, synthetic construct
  source 1..74: mol_type = other RNA
aaataaataaataaaaaaaaaaaaaaaaaaaaaataaataaaaaaaaaaaaaaaaaaaaaaaaaaaataaataa

SEQ ID NO: 11466 - RNA, 74 nt, synthetic construct
  source 1..74: mol_type = other RNA
aaataaataaataaataaaaaaaaaaaaaaaaaaaaaaaaaaaaaaaaaaaaataaataaaaaaaaaaaaataa

SEQ ID NO: 11467 - RNA, 74 nt, synthetic construct
  source 1..74: mol_type = other RNA
aaataaataaataaataaataaaaaaaaaaaaaaaaaaaaaaaaaaaaaaaaaaaaataaaaaaaaaaaaataa

SEQ ID NO: 11468 - RNA, 74 nt, synthetic construct
  source 1..74: mol_type = other RNA
aaataaataaataaataaaaaaaaaaaaaaaaaataaataaaaaaaaaaaaaaaaaaaaaaaaaaaataaataa

SEQ ID NO: 11469 - RNA, 74 nt, synthetic construct
  source 1..74: mol_type = other RNA
aaataaataaataaataaataaaaaaaaaaaaaaaaaaaaaaaaaaaaaaaaataaataaaaaaaaaaaaataa

SEQ ID NO: 11470 - RNA, 74 nt, synthetic construct
  source 1..74: mol_type = other RNA
aaataaataaataaataaaaaaaaaaaaaaaaaaaaaaaaaaaaaaaaataaataaataaaaaaaaaaaaataa

SEQ ID NO: 11471 - RNA, 74 nt, synthetic construct
  source 1..74: mol_type = other RNA
aaataaataaataaataaataaaaaaaaaaaaaataaataaaaaaaaaaaaaaaaaaaaaaaaaaaataaataa

SEQ ID NO: 11472 - RNA, 74 nt, synthetic construct
  source 1..74: mol_type = other RNA
aaataaataaataaataaataaataaaaaaaaaaaaaaataaataaaaaaaaaaaaaaaaaaaaaaaaaaataa

SEQ ID NO: 11473 - RNA, 74 nt, synthetic construct
  source 1..74: mol_type = other RNA
aaataaataaataaataaataaaaaaaaaaaaaaaaaaaaaaaaaaaaataaataaataaaaaaaaaaaaataa

SEQ ID NO: 11474 - RNA, 74 nt, synthetic construct
  source 1..74: mol_type = other RNA
aaataaataaataaataaataaaaaaaaaaaaaataaataaataaaaaaaaaaaaaaaaaaaaaaaataaataa

SEQ ID NO: 11475 - RNA, 74 nt, synthetic construct
  source 1..74: mol_type = other RNA
aaataaataaataaataaataaaaaaaaaataaataaataaaaaaaaaaaaaaaaaaaaaaaaaaaataaataa

SEQ ID NO: 11476 - RNA, 74 nt, synthetic construct
  source 1..74: mol_type = other RNA
aaaaaaaaaaaaaaaaaaaaaaaataaataaaaaaaaaaaaaaaaaaaaaaaaaaaaaaaaaaaaaaaaataat

SEQ ID NO: 11477 - RNA, 74 nt, synthetic construct
  source 1..74: mol_type = other RNA
aaaaaaaaaaaaaaaaaaaaaaaaaaaaaaaaaaaaaaaaaaaaaaaaataaaaaaaaaaaaaaaataaataat

SEQ ID NO: 11478 - RNA, 74 nt, synthetic construct
  source 1..74: mol_type = other RNA
aaaaaaaaaaaaaaaaaaaaaaaaaaaaaaaaaaaaaaaaaaaaaaaaaaaaaaaaaaaaaaaaaaaaatatag

SEQ ID NO: 11479 - RNA, 74 nt, synthetic construct
  source 1..74: mol_type = other RNA
aaataaataaataaataaaaaaaaaaaaaaaaaaaaaaaaaaaaaaaaaaaaataaataaaaaaaaaaaaatat

SEQ ID NO: 11480 - RNA, 74 nt, synthetic construct
  source 1..74: mol_type = other RNA
aaaaaaaaaaaaaaaaaaaaaaaaaaaaaaaaaaaaaaaataaataaaaaaaaaataaataaaaaaaaaatata

SEQ ID NO: 11481 - RNA, 74 nt, synthetic construct
  source 1..74: mol_type = other RNA
aaataaataaataaataaataaaaaaaaaaaaaaaaaaaaaaaaaaaaaaaaataaataaaaaaaaaaaaatat

SEQ ID NO: 11482 - RNA, 74 nt, synthetic construct
  source 1..74: mol_type = other RNA
aaataaataaataaataaaaaaaaaaaaaaaaaaaaaaaaaaaaaaaaataaataaataaaaaaaaaaaaatat

SEQ ID NO: 11483 - RNA, 74 nt, synthetic construct
  source 1..74: mol_type = other RNA
aaataaataaataaataaataaaaaaaaaaaaaataaataaaaaaaaaaaaaaaaaaaaaaaaaaaataaatat

SEQ ID NO: 11484 - RNA, 74 nt, synthetic construct
  source 1..74: mol_type = other RNA
aaataaataaataaataaataaaaaaaaaaaaaaaaaaaaaaaaaaaaataaataaataaaaaaaaaaaaatat

SEQ ID NO: 11485 - RNA, 74 nt, synthetic construct
  source 1..74: mol_type = other RNA
aaataaataaataaataaataaaaaaaaaaaaaataaataaataaaaaaaaaaaaaaaaaaaaaaaataaatat

SEQ ID NO: 11486 - RNA, 74 nt, synthetic construct
  source 1..74: mol_type = other RNA
aaataaataaataaataaataaaaaaaaaataaataaataaaaaaaaaaaaaaaaaaaaaaaaaaaataaatat

SEQ ID NO: 11487 - RNA, 74 nt, synthetic construct
  source 1..74: mol_type = other RNA
aaaaaaaaaataaataaataaataaatataaataaataaataaataaatataaataaataaatataaatataaa

SEQ ID NO: 11488 - RNA, 74 nt, synthetic construct
  source 1..74: mol_type = other RNA
aaaaaaaaaataaataaataaataaatataaataaataaataaataaataaatataaataaatataaatataaa

SEQ ID NO: 11489 - RNA, 74 nt, synthetic construct
  source 1..74: mol_type = other RNA
aaataaataaataaataaataaaaaaaaaataaataaataaataaaaaaaaaaaaaaaaaaaaaaaataaatat

SEQ ID NO: 11490 - RNA, 74 nt, synthetic construct
  source 1..74: mol_type = other RNA
aaaaaataaataaataaataaataaatataaataaataaataaataaataaatataaataaatataaatataaa

SEQ ID NO: 11491 - RNA, 74 nt, synthetic construct
  source 1..74: mol_type = other RNA
aaaaaataaataaataaataaataaatataaataaataaataaataaatataaataaataaatataaatataaa

SEQ ID NO: 11492 - RNA, 74 nt, synthetic construct
  source 1..74: mol_type = other RNA
aataaaaaaaaaaaaaaaaaaaaaaaaaaaaaaaaaaaaaaaaaaaaaaaaaaaaaaaaaaaaaaaaaatataa

SEQ ID NO: 11493 - RNA, 74 nt, synthetic construct
  source 1..74: mol_type = other RNA
aaataaaaaaaaaaaaaaaaaaaaaaaaaaaaaaaaaaaaaaaaaaaaaaaaaaaaaaaataaataataaataa

SEQ ID NO: 11494 - RNA, 74 nt, synthetic construct
  source 1..74: mol_type = other RNA
aaataaaaaaaaaaaaaaaaaaaaaaaaaaaaaaaaaaaaaaaaaaaaaaaaaaaaaaaataataaataaataa

SEQ ID NO: 11495 - RNA, 74 nt, synthetic construct
  source 1..74: mol_type = other RNA
aaaaaaaaaatataaataaataaataaatataaaaaaaaaaaaaaaaaaaaaaaaatataaataaataaatata

SEQ ID NO: 11496 - RNA, 74 nt, synthetic construct
  source 1..74: mol_type = other RNA
aaaaaaaaaatataaataaataaataaatataaaaaaaaaaaaaaaaaaaaataaatataaataaataaatata

SEQ ID NO: 11497 - RNA, 74 nt, synthetic construct
  source 1..74: mol_type = other RNA
aaaaaaaaaatataaataaataaataaatataaataaaaaaaaaaaaaaaaaaaaatataaataaataaatata

SEQ ID NO: 11498 - RNA, 74 nt, synthetic construct
  source 1..74: mol_type = other RNA
aaataaataaataaataaaaaaaaaaaaaaaaaaaaaaaaaaaaaaaaaaaaataaataaaaaaaaaaaaaata

SEQ ID NO: 11499 - RNA, 74 nt, synthetic construct
  source 1..74: mol_type = other RNA
aaataaataaataaataaataaaaaaaaaaaaaaaaaaaaaaaaaaaaaaaaataaataaaaaaaaaaaaaata

SEQ ID NO: 11500 - RNA, 74 nt, synthetic construct
  source 1..74: mol_type = other RNA
aaaaaaaatataaaaaaaaaaaaaaaaaaaaaaaaaaaaaaaaaaataaataaataaataaatataaatatata

SEQ ID NO: 11501 - RNA, 74 nt, synthetic construct
  source 1..74: mol_type = other RNA
aaaaaaaatataaaaaaaaaaaaaaaaaaaaaaaaaaaaaaaaaaataaataaataaataaatatataaatata

SEQ ID NO: 11502 - RNA, 74 nt, synthetic construct
  source 1..74: mol_type = other RNA
aaaaaaaatataaaaaaaaaaaaaaaaaaaaaaaaaaaaaaataaataaataaataaataaatatataaatata

SEQ ID NO: 11503 - RNA, 74 nt, synthetic construct
  source 1..74: mol_type = other RNA
aaaaaaaatataaaaaaaaaaaaaaaaaaaaaaaaaaaaaaataaataaataaataaataaatataaatatata

SEQ ID NO: 11504 - RNA, 74 nt, synthetic construct
  source 1..74: mol_type = other RNA
aaaataaatataaaaaaaaaaaaaaaaaaaaaaaaaaaaaaaaaaataaataaataaataaatataaatatata

SEQ ID NO: 11505 - RNA, 74 nt, synthetic construct
  source 1..74: mol_type = other RNA
aaaataaatataaaaaaaaaaaaaaaaaaaaaaaaaaaaaaataaataaataaataaataaatataaatatata

SEQ ID NO: 11506 - RNA, 74 nt, synthetic construct
  source 1..74: mol_type = other RNA
aaaaaaaaaaaaaaaaaaaaaaaaaaaaaaaaataaataaatataaaaaaaaaaaaaaaaaaaatataaataaa

SEQ ID NO: 11507 - RNA, 74 nt, synthetic construct
  source 1..74: mol_type = other RNA
aaaaaaaaaaaaaaaaaaaaaaaaaaaaaaaaataaataaatataaataaaaaaaaaaaaaaaatataaataaa

SEQ ID NO: 11508 - RNA, 74 nt, synthetic construct
  source 1..74: mol_type = other RNA
aaataaaaaaaaaaaaatataaataaataaaaaaaaaaaaaaaaaaaaaaaaaaaaaaaaaaaaaaaaaaataa

SEQ ID NO: 11509 - RNA, 74 nt, synthetic construct
  source 1..74: mol_type = other RNA
aaaaaaaaaaaaaaaaaaaaaaaaaaataaaaaaaaaaaaaaaaaaaaaaaaaaaaaaaaaaaaaaatatataa

SEQ ID NO: 11510 - RNA, 74 nt, synthetic construct
  source 1..74: mol_type = other RNA
aaataaaaaataaaaaaaaaaaaaaaaaaaaaaaaaaaaaaaaaaataaataaataaataaatataaatatata

SEQ ID NO: 11511 - RNA, 74 nt, synthetic construct
  source 1..74: mol_type = other RNA
aaaaaaaaaaaaaaaaaaaaaaaaaaataaaaaaaaaaaaaaaaaaaaaaaaaaaaaaaaaaataaatatataa

SEQ ID NO: 11512 - RNA, 74 nt, synthetic construct
  source 1..74: mol_type = other RNA
aaataaataaatataaataaaaaaaaaaaaaaaaaaaaaaaaaaaaaaaaaaataaataaaaaaaaaaaaataa

SEQ ID NO: 11513 - RNA, 74 nt, synthetic construct
  source 1..74: mol_type = other RNA
aaataaataaataaataaaaaaaaaaaaaaaaaaaaaaaaaaaaaaaaaaatataaataaaaaaaaaaaaataa

SEQ ID NO: 11514 - RNA, 74 nt, synthetic construct
  source 1..74: mol_type = other RNA
aaataaataaataaataaatataaaaaaaaaaaaaaaaaaaaaaaaaaaaaaataaataaaaaaaaaaaaataa

SEQ ID NO: 11515 - RNA, 74 nt, synthetic construct
  source 1..74: mol_type = other RNA
aaaaaaaaaaaaaaaaaaaaaaaaaaataaaaaaaaaaaaaaaaaaaaaaaaaaaaaaataaataaatatataa

SEQ ID NO: 11516 - RNA, 74 nt, synthetic construct
  source 1..74: mol_type = other RNA
aaaaaaaaaaaaaaaaaaaaaaaaaaataaaaaaaaaaaaaaaaaaaaaaaaaaataaataaataaatatataa

SEQ ID NO: 11517 - RNA, 74 nt, synthetic construct
  source 1..74: mol_type = other RNA
aaaaaaaaaataaataaaaaaaaaaaaaaaaaaaaaaaaaaaataaataaataaataaataaatatataaataa

SEQ ID NO: 11518 - RNA, 75 nt, synthetic construct
  source 1..75: mol_type = other RNA
aaaaaaaaaaaaaaaaaaaaaaaaaaaaaaaaaaaaaaataaataaataaataaatataaataaataaatatata

SEQ ID NO: 11519 - RNA, 75 nt, synthetic construct
  source 1..75: mol_type = other RNA
aaaaaaaaaaaaaaaaaaaaaaaaaaaaaaaaaaaaaaataaataaataaatataaataaataaataaatatata

SEQ ID NO: 11520 - RNA, 75 nt, synthetic construct
  source 1..75: mol_type = other RNA
aaaaaaaaaaaaaaaaaaaaaaaaaaaaaaaaaaataaataaataaataaataaatataaataaataaatatata

SEQ ID NO: 11521 - RNA, 75 nt, synthetic construct
  source 1..75: mol_type = other RNA
aaaaaaaaaaaaaaaaaaaaaaaaaaaaaaaaaaataaataaataaataaatataaataaataaataaatatata

SEQ ID NO: 11522 - RNA, 75 nt, synthetic construct
  source 1..75: mol_type = other RNA
aaaaaaaaaaaaaaaaaaaaaaaaaaaaaaataaataaataaataaataaataaatataaataaataaatatata

SEQ ID NO: 11523 - RNA, 75 nt, synthetic construct
  source 1..75: mol_type = other RNA
aaaaaaaaaaaaaaaaaaaaaaaaaaaaaaataaataaataaataaataaatataaataaataaataaatatata

SEQ ID NO: 11524 - RNA, 75 nt, synthetic construct
  source 1..75: mol_type = other RNA
aaaaaaaaaaaaaaaaaaaaaaaaaaaaaaaaaaaaaaaaaaaaaaaaaaaaaaaataaataaaaaaaaaatata

SEQ ID NO: 11525 - RNA, 75 nt, synthetic construct
  source 1..75: mol_type = other RNA
aaaaaaaaaaaaaaaaaaaaaaaaaaaaaaaaaaaaaaaaaaaaaaaaaaaataaataaataaaaaaaaaatata

SEQ ID NO: 11526 - RNA, 75 nt, synthetic construct
  source 1..75: mol_type = other RNA
aaaaaaaaaaaaaaaaaaaaaaaaaaaaaaaaaaaaaaaaaaaaaaaaaaaaaaaataaataaataaaaaatata

SEQ ID NO: 11527 - RNA, 75 nt, synthetic construct
  source 1..75: mol_type = other RNA
aaaaaaaaaaaaaaaaaaaaaaaaaaaaaaaaaaaaaaaaaaaaaaaataaataaataaataaaaaaaaaatata

SEQ ID NO: 11528 - RNA, 75 nt, synthetic construct
  source 1..75: mol_type = other RNA
aaaaaaaaaaaaaaaaaaaaaaaaaaaaaaaaaaaaaaaaaaaaaaaaaaaataaataaataaataaaaaatata

SEQ ID NO: 11529 - RNA, 75 nt, synthetic construct
  source 1..75: mol_type = other RNA
aaaaaaaaaaaaaaaaaaaaaaaaaaaaaaaaaaaaaaaaaaaaaaaataaataaataaataaataaaaaatata

SEQ ID NO: 11530 - RNA, 75 nt, synthetic construct
  source 1..75: mol_type = other RNA
aaaaaaaaaaaaaaaaaaaaaaaaaaaaaaaaaaaaatataaataaataaataaatataaataaataaatatata

SEQ ID NO: 11531 - RNA, 75 nt, synthetic construct
  source 1..75: mol_type = other RNA
aaataaataaataaataaaaaaaaaaaaaaaaaaaaaaaaaaaaaaaaaaaaataaatataaataaataaataaa

SEQ ID NO: 11532 - RNA, 75 nt, synthetic construct
  source 1..75: mol_type = other RNA
aaataaataaataaataaataaaaaaaaaaaaaaaaaaaaaaaaaaaaaaaaataaatataaataaataaataaa

SEQ ID NO: 11533 - RNA, 75 nt, synthetic construct
  source 1..75: mol_type = other RNA
aaataaataaataaataaataaaaaaaaaaaaaaaaaaaaaaaaaaaaaaaaatataaataaataaataaataaa

SEQ ID NO: 11534 - RNA, 75 nt, synthetic construct
  source 1..75: mol_type = other RNA
aaataaataaataaataaataaataaaaaaaaaaaaaaaaaaaaaaaaaaaaatataaataaataaataaataaa

SEQ ID NO: 11535 - RNA, 75 nt, synthetic construct
  source 1..75: mol_type = other RNA
aaataaataaataaataaataaataaaaaaaaaaaaaaaaaaaaaaaaaaaaataaatataaataaataaataaa

SEQ ID NO: 11536 - RNA, 75 nt, synthetic construct
  source 1..75: mol_type = other RNA
aaataaataaataaataaataaaaaaaaaaaaaaaaaaaaaaaaaaaaataaataaatataaataaataaataaa

SEQ ID NO: 11537 - RNA, 75 nt, synthetic construct
  source 1..75: mol_type = other RNA
aaaaaaaaaaaaaaaaaaaaaaaaaaaaaaaaaaaaaaaaaaaaaaaaaaaaaatataaataaaaaaaaaatata

SEQ ID NO: 11538 - RNA, 75 nt, synthetic construct
  source 1..75: mol_type = other RNA
aaaaaaaaaaaaaaaaaaaaaaaaaaaaaaaaaaaaaaaaaaaaaaaaaaaaaaaataaatataaaaaaaatata

SEQ ID NO: 11539 - RNA, 75 nt, synthetic construct
  source 1..75: mol_type = other RNA
aaataaataaataaataaataaataaataaaaaaaaaaaaaaaaaaaaaaaaatataaataaataaataaataaa

SEQ ID NO: 11540 - RNA, 75 nt, synthetic construct
  source 1..75: mol_type = other RNA
aaataaataaataaataaataaataaataaaaaaaaaaaaaaaaaaaaaaaaataaatataaataaataaataaa

SEQ ID NO: 11541 - RNA, 75 nt, synthetic construct
  source 1..75: mol_type = other RNA
aaaaaaaaaaaaaaaaaaaaaaaaaaaaaaaaaaaaaaaaaaaaaaaaaatataaataaataaaaaaaaaatata

SEQ ID NO: 11542 - RNA, 75 nt, synthetic construct
  source 1..75: mol_type = other RNA
aaaaaaaaaaaaaaaaaaaaaaaaaaaaaaaaaaaaaaaaaaaaaaaaaaaataaataaatataaaaaaaatata

SEQ ID NO: 11543 - RNA, 75 nt, synthetic construct
  source 1..75: mol_type = other RNA
aaaaaaaaaaaaaaaaaaaaaaaaaaaaaaaaaaaaaaaaaaaaaaaaaatataaataaataaataaaaaatata

SEQ ID NO: 11544 - RNA, 75 nt, synthetic construct
  source 1..75: mol_type = other RNA
aaaaaaaaaaaaaaaaaaaaaaaaaaaaaaaaaaaaaaaaaaaaaaaataaataaataaatataaaaaaaatata

SEQ ID NO: 11545 - RNA, 75 nt, synthetic construct
  source 1..75: mol_type = other RNA
aaaaaaaaaaaaaaaataaaaaaaaaaaaaaaaaaaaaaaaaaaaaaaaaaaataaatataaataaataaatata

SEQ ID NO: 11546 - RNA, 75 nt, synthetic construct
  source 1..75: mol_type = other RNA
aaaaaaaaaaaaaaaataaaaaaaaaaaaaaaaaaaaaaaaaaaaaaaaaaaatataaataaataaataaatata

SEQ ID NO: 11547 - RNA, 75 nt, synthetic construct
  source 1..75: mol_type = other RNA
aaaaaaaaaaaaaaaataaataaaaaaaaaaaaaaaaaaaaaaaaaaaaaaaataaatataaataaataaatata

SEQ ID NO: 11548 - RNA, 75 nt, synthetic construct
  source 1..75: mol_type = other RNA
aaaaaaaaaaaaaaaataaaaaaaaaaaaaaaaaaaaaaaaaaaaaaaataaataaatataaataaataaatata

SEQ ID NO: 11549 - RNA, 75 nt, synthetic construct
  source 1..75: mol_type = other RNA
aaaaaaaaaaaaaaaataaaaaaaaaaaaaaaaaaaaaaaaaaaaaaaataaatataaataaataaataaatata

SEQ ID NO: 11550 - RNA, 75 nt, synthetic construct
  source 1..75: mol_type = other RNA
aaaaaaaaaaaataaataaaaaaaaaaaaaaaaaaaaaaaaaaaaaaaaaaaataaatataaataaataaatata

SEQ ID NO: 11551 - RNA, 75 nt, synthetic construct
  source 1..75: mol_type = other RNA
aaaaaaaaaaaataaataaaaaaaaaaaaaaaaaaaaaaaaaaaaaaaataaatataaataaataaataaatata

SEQ ID NO: 11552 - RNA, 75 nt, synthetic construct
  source 1..75: mol_type = other RNA
aaaaaaaaaaaataaataaaaaaaaaaaaaaaaaaaaaaaaaaaaaaaataaataaatataaataaataaatata

SEQ ID NO: 11553 - RNA, 75 nt, synthetic construct
  source 1..75: mol_type = other RNA
aaaaaaaaaaaaaaaataaataaaaaaaaaaaaaaaaaaaaaaaaaaaataaatataaataaataaataaatata

SEQ ID NO: 11554 - RNA, 75 nt, synthetic construct
  source 1..75: mol_type = other RNA
aaaaaaaaaaaaaaaataaataaaaaaaaaaaaaaaaaaaaaaaaaaaataaataaatataaataaataaatata

SEQ ID NO: 11555 - RNA, 75 nt, synthetic construct
  source 1..75: mol_type = other RNA
aaaaaaaaaaaataaataaataaaaaaaaaaaaaaaaaaaaaaaaaaaaaaaataaatataaataaataaatata

SEQ ID NO: 11556 - RNA, 75 nt, synthetic construct
  source 1..75: mol_type = other RNA
aaaaaaaaaaaataaataaataaaaaaaaaaaaaaaaaaaaaaaaaaaataaatataaataaataaataaatata

SEQ ID NO: 11557 - RNA, 75 nt, synthetic construct
  source 1..75: mol_type = other RNA
aaaaaaaaaaaataaataaataaaaaaaaaaaaaaaaaaaaaaaaaaaataaataaatataaataaataaatata

SEQ ID NO: 11558 - RNA, 75 nt, synthetic construct
  source 1..75: mol_type = other RNA
aaaaaaaaaaaataaataaataaataaaaaaaaaaaaaaaaaaaaaaaataaataaatataaataaataaatata

SEQ ID NO: 11559 - RNA, 75 nt, synthetic construct
  source 1..75: mol_type = other RNA
aaaaaaaaaaaataaataaataaataaaaaaaaaaaaaaaaaaaaaaaataaatataaataaataaataaatata

SEQ ID NO: 11560 - RNA, 75 nt, synthetic construct
  source 1..75: mol_type = other RNA
aaataaataaataaataaaaaaaaaaaaaaaaaaaaaaaaaaaaaaaaaaaaaataaataaaaaaaaaaaatata

SEQ ID NO: 11561 - RNA, 75 nt, synthetic construct
  source 1..75: mol_type = other RNA
aaataaataaataaataaaaaaaaaaaaaaaaaaaaaaaaaaaaaaaaaaaaaataaataaataaaaaaaatata

SEQ ID NO: 11562 - RNA, 75 nt, synthetic construct
  source 1..75: mol_type = other RNA
aaataaataaataaataaataaaaaaaaaaaaaaaaaaaaaaaaaaaaaaaaaataaataaaaaaaaaaaatata

SEQ ID NO: 11563 - RNA, 75 nt, synthetic construct
  source 1..75: mol_type = other RNA
aaataaataaataaataaaaaaaaaaaaaaaaaaaaaaaaaaaaaaaaaaaaaataaataaataaataaaatata

SEQ ID NO: 11564 - RNA, 75 nt, synthetic construct
  source 1..75: mol_type = other RNA
aaataaataaaaaaaaaaaaaaaaaataaataaataaataaataaaaaaaaaaaaaaaaaaaataaataaatata

SEQ ID NO: 11565 - RNA, 75 nt, synthetic construct
  source 1..75: mol_type = other RNA
aaataaataaaaaaaaaaaaaaaaaataaataaataaataaataaataaaaaaaaaaaaaaaataaataaatata

SEQ ID NO: 11566 - RNA, 75 nt, synthetic construct
  source 1..75: mol_type = other RNA
aaaaaaaaaaaaaaaaaaaaaaaaaaaaaaaaaaaaaaaaaaaaaaaaaaaaaaaataaataaaaaaaaaataaa

SEQ ID NO: 11567 - RNA, 75 nt, synthetic construct
  source 1..75: mol_type = other RNA
aaaaaaaaaaaaaaaaaaaaaaaaaaaaaaaaaaaaaaataaatatataaataaatataaataaataaatatata

SEQ ID NO: 11568 - RNA, 75 nt, synthetic construct
  source 1..75: mol_type = other RNA
aaataaataaataaataaataaaaaaaaaaaaaaaaaaaaaaaaaaaaaaatataaatataaataaataaataaa

SEQ ID NO: 11569 - RNA, 75 nt, synthetic construct
  source 1..75: mol_type = other RNA
aaataaataaataaataaatataaaaaaaaaaaaaaaaaaaaaaaaaaaaaaatataaataaataaataaataaa

SEQ ID NO: 11570 - RNA, 75 nt, synthetic construct
  source 1..75: mol_type = other RNA
aaataaataaataaataaatataaaaaaaaaaaaaaaaaaaaaaaaaaaaaaataaatataaataaataaataaa

SEQ ID NO: 11571 - RNA, 75 nt, synthetic construct
  source 1..75: mol_type = other RNA
aaataaataaataaataaataaataaaaaaaaaaaaaaaaaaaaaaaaaaatataaatataaataaataaataaa

SEQ ID NO: 11572 - RNA, 75 nt, synthetic construct
  source 1..75: mol_type = other RNA
aaataaataaataaataaataaatataaaaaaaaaaaaaaaaaaaaaaaaaaataaatataaataaataaataaa

SEQ ID NO: 11573 - RNA, 75 nt, synthetic construct
  source 1..75: mol_type = other RNA
aaataaataaataaataaataaatataaaaaaaaaaaaaaaaaaaaaaaaaaatataaataaataaataaataaa

SEQ ID NO: 11574 - RNA, 75 nt, synthetic construct
  source 1..75: mol_type = other RNA
aaataaataaataaataaatataaataaaaaaaaaaaaaaaaaaaaaaaaaaatataaataaataaataaataaa

SEQ ID NO: 11575 - RNA, 75 nt, synthetic construct
  source 1..75: mol_type = other RNA
aaataaataaataaataaatataaataaaaaaaaaaaaaaaaaaaaaaaaaaataaatataaataaataaataaa

SEQ ID NO: 11576 - RNA, 75 nt, synthetic construct
  source 1..75: mol_type = other RNA
aaataaataaataaataaataaataaataaaaaaaaaaaaaaaaaaaaaaatataaatataaataaataaataaa

SEQ ID NO: 11577 - RNA, 75 nt, synthetic construct
  source 1..75: mol_type = other RNA
aaaaaaaaaaaaaatataaaaaaaaaaaaaaaaaaaaaaaaaaaaaaaaaaaataaatataaataaataaatata

SEQ ID NO: 11578 - RNA, 75 nt, synthetic construct
  source 1..75: mol_type = other RNA
aaaaaaaaaaaaaaaataaaaaaaaaaaaaaaaaaaaaaaaaaaaaaaaaatataaatataaataaataaatata

SEQ ID NO: 11579 - RNA, 75 nt, synthetic construct
  source 1..75: mol_type = other RNA
aaaaaaaaaaaaaaaaaaaaaaaaaaaaaaaaaaaaaaataaataaataaatatatataaataaataaatatata

SEQ ID NO: 11580 - RNA, 75 nt, synthetic construct
  source 1..75: mol_type = other RNA
aaaaaaaaaaaaaaaaaaaaaaaaaaaaaaaaaaataaataaataaataaatatatataaataaataaatatata

SEQ ID NO: 11581 - RNA, 75 nt, synthetic construct
  source 1..75: mol_type = other RNA
aaaaaaaaaaaaaaaaaaaaaaaaaaaaaaataaataaataaataaataaatatatataaataaataaatatata

SEQ ID NO: 11582 - RNA, 75 nt, synthetic construct
  source 1..75: mol_type = other RNA
aaatataaataaataaaaaaaaaaaaaaaaaaaaaaaaaaaaaaaaaaaaaaaaaaaaaataaaaaaaaaatata

SEQ ID NO: 11583 - RNA, 75 nt, synthetic construct
  source 1..75: mol_type = other RNA
aaaaaaaaaaaataaataaatataaataaaaaaaaaaaaaaaaaaaaaataaatataaataaataaataaatata

SEQ ID NO: 11584 - RNA, 75 nt, synthetic construct
  source 1..75: mol_type = other RNA
aaaaaaaaaaaataaataaatataaataaaaaaaaaaaaaaaaaaaaaataaataaatataaataaataaatata

SEQ ID NO: 11585 - RNA, 75 nt, synthetic construct
  source 1..75: mol_type = other RNA
aaataaataaataaataaataaataaaaaaaaaaaaaaaaaaaaaaaaaaatatataaataaataaataaataaa

SEQ ID NO: 11586 - RNA, 75 nt, synthetic construct
  source 1..75: mol_type = other RNA
aaaaaaaaaaaataaataaatataaataaaaaaaaaaaaaaaaaataaataaatataaataaataaataaatata

SEQ ID NO: 11587 - RNA, 75 nt, synthetic construct
  source 1..75: mol_type = other RNA
aaataaataaataaatataaaaaaaaaaaaaaaaaaaaaaaaaaaaaaaaaaaataaataaaaaaaaaaaatata

SEQ ID NO: 11588 - RNA, 75 nt, synthetic construct
  source 1..75: mol_type = other RNA
aaataaataaataaataaaaaaaaaaaaaaaaaaaaaaaaaaaaaaaaaaaaaatataaataaaaaaaaaatata

SEQ ID NO: 11589 - RNA, 75 nt, synthetic construct
  source 1..75: mol_type = other RNA
aaataaataaataaataaaaaaaaaaaaaaaaaaaaaaaaaaaaaaaaaaaaaataaatataaaaaaaaaatata

SEQ ID NO: 11590 - RNA, 75 nt, synthetic construct
  source 1..75: mol_type = other RNA
aaataaataaataaataaataaataaataaaaaaaaaaaaaaaaaaaaaaatatataaataaataaataaataaa

SEQ ID NO: 11591 - RNA, 75 nt, synthetic construct
  source 1..75: mol_type = other RNA
aaataaaaaaaaaaaataaaaaaaaaaaaaaaaaaaaaaaaaaaaaaaataaataaatataaataaataaatata

SEQ ID NO: 11592 - RNA, 75 nt, synthetic construct
  source 1..75: mol_type = other RNA
aaataaataaataaatataaaaaaaaaaaaaaaaaaaaaaaaaaaaaaaaaaaataaataaataaaaaaaatata

SEQ ID NO: 11593 - RNA, 75 nt, synthetic construct
  source 1..75: mol_type = other RNA
aaaaaaaaaaaaaaaaaaaaaaaaaaaaaaaaaaaaaaaaaaaaaaaaaaaataaataaatatataaaaaatata

SEQ ID NO: 11594 - RNA, 75 nt, synthetic construct
  source 1..75: mol_type = other RNA
aaaaaaaaaaaaaaaaaaaaaaaaaaataaaaaaaaaaaaaaaaaaaaaaaaaaaaaaaaaaaaaataaatataa

SEQ ID NO: 11595 - RNA, 75 nt, synthetic construct
  source 1..75: mol_type = other RNA
aaataaataaataaataaataaataaaaaaaaaaaaaaaaaaaaaaaaaaaaataaatataaataaataaataat

SEQ ID NO: 11596 - RNA, 75 nt, synthetic construct
  source 1..75: mol_type = other RNA
aaataaaaaaaataaataaaaaaaaaaaaaaaaaaaaaaaaaaaaaaaataaataaatataaataaataaatata

SEQ ID NO: 11597 - RNA, 75 nt, synthetic construct
  source 1..75: mol_type = other RNA
aaataaaaaaaataaataaaaaaaaaaaaaaaaaaaaaaaaaaaaaaaataaatataaataaataaataaatata

SEQ ID NO: 11598 - RNA, 75 nt, synthetic construct
  source 1..75: mol_type = other RNA
aaataaaaaaaaaaaataaataaaaaaaaaaaaaaaaaaaaaaaaaaaataaataaatataaataaataaatata

SEQ ID NO: 11599 - RNA, 75 nt, synthetic construct
  source 1..75: mol_type = other RNA
aaataaaaaaaaaaaataaataaaaaaaaaaaaaaaaaaaaaaaaaaaataaatataaataaataaataaatata

SEQ ID NO: 11600 - RNA, 75 nt, synthetic construct
  source 1..75: mol_type = other RNA
aaataaataaataaatataaaaaaaaaaaaaaaaaaaaaaaaaaaaaaaaaaaataaataaataaataaaatata

SEQ ID NO: 11601 - RNA, 75 nt, synthetic construct
  source 1..75: mol_type = other RNA
aaataaaaaaaataaataaataaaaaaaaaaaaaaaaaaaaaaaaaaaataaataaatataaataaataaatata

SEQ ID NO: 11602 - RNA, 75 nt, synthetic construct
  source 1..75: mol_type = other RNA
aaataaaaaaaataaataaataaaaaaaaaaaaaaaaaaaaaaaaaaaataaatataaataaataaataaatata

SEQ ID NO: 11603 - RNA, 75 nt, synthetic construct
  source 1..75: mol_type = other RNA
aaaaaaaaaaaaaaaaaaaaaaaaaaaaaaaaaaaaaaaaaaaaaaaaaaatataaaaaaaaaaaaaaaaataaa

SEQ ID NO: 11604 - RNA, 75 nt, synthetic construct
  source 1..75: mol_type = other RNA
aaaaaaaaaaaaaaaaaaaaaaaaaaaaaaaaaaaaaaataaataaataaaaaaatataaataaataaatatata

SEQ ID NO: 11605 - RNA, 75 nt, synthetic construct
  source 1..75: mol_type = other RNA
aaataaaaaaaataaataaataaataaaaaaaaaaaaaaaaaaaaaaaataaataaatataaataaataaatata

SEQ ID NO: 11606 - RNA, 75 nt, synthetic construct
  source 1..75: mol_type = other RNA
aaaaaaaaaaaaaaaataaataaaaaaaaaaaaaaaaaaaaaaaaaaaaaatatataaataaataaataaatata

SEQ ID NO: 11607 - RNA, 75 nt, synthetic construct
  source 1..75: mol_type = other RNA
aaaaaaaaaaaaaaaaaaaaaaaaaaaaaaaaaaaaaaaaaaaaaaaaaaatataaataaaaaaaaaaaaataaa

SEQ ID NO: 11608 - RNA, 75 nt, synthetic construct
  source 1..75: mol_type = other RNA
aaaaaaaaaaaataaataaataaaaaaaaaaaaaaaaaaaaaaaaaaaaaatatataaataaataaataaatata

SEQ ID NO: 11609 - RNA, 75 nt, synthetic construct
  source 1..75: mol_type = other RNA
aaaaaaaaaaaaaataaaaaaaaaaaaaaaaaaaaaaaataaataaataaataaatataaataaataaatatata

SEQ ID NO: 11610 - RNA, 75 nt, synthetic construct
  source 1..75: mol_type = other RNA
aaaaaaaaaaaaaataaaaaaaaaaaaaaaaaaaaaaaataaataaataaatataaataaataaataaatatata

SEQ ID NO: 11611 - RNA, 75 nt, synthetic construct
  source 1..75: mol_type = other RNA
aaaaaaaaaaaaaaaaataaaaaaaaaaaaaaaaaaaaataaataaataaataaatataaataaataaatatata

SEQ ID NO: 11612 - RNA, 75 nt, synthetic construct
  source 1..75: mol_type = other RNA
aaaaaaaaaaaaaaaaaataaaaaaaaaaaaaaaaaaaataaataaataaataaatataaataaataaatatata

SEQ ID NO: 11613 - RNA, 75 nt, synthetic construct
  source 1..75: mol_type = other RNA
aaaaaaaaaaaaaaaaaaaaaaaaaaaaaaataaaaaaataaataaataaataaatataaataaataaatatata

SEQ ID NO: 11614 - RNA, 75 nt, synthetic construct
  source 1..75: mol_type = other RNA
aaaaaaaaaaaaaaaaaaaaaaaaaataaaaaaaaaaaataaataaataaataaatataaataaataaatatata

SEQ ID NO: 11615 - RNA, 75 nt, synthetic construct
  source 1..75: mol_type = other RNA
aaaaaaaaaaaaataaaaaaaaaaaaaaaaaaaaaaaaataaataaataaataaatataaataaataaatatata

SEQ ID NO: 11616 - RNA, 75 nt, synthetic construct
  source 1..75: mol_type = other RNA
aaaaaaaaaaaaaaaaaaaaaaaaaaaataaaaaaaaaataaataaataaataaatataaataaataaatatata

SEQ ID NO: 11617 - RNA, 75 nt, synthetic construct
  source 1..75: mol_type = other RNA
aaaaaaaaaaaaaaaaaaaaataaaaaaaaaaaaaaaaataaataaataaataaatataaataaataaatatata

SEQ ID NO: 11618 - RNA, 75 nt, synthetic construct
  source 1..75: mol_type = other RNA
aaaaaaaaaaaaaaaaaaaaaaaaaaaaaaaataaaaaataaataaataaataaatataaataaataaatatata

SEQ ID NO: 11619 - RNA, 76 nt, synthetic construct
  source 1..76: mol_type = other RNA
aaataaataaataaataaaaaaaaaaaaaaaaaaaaaaaaaaaaaaaaaaaaaataaataaataaatataaatata

SEQ ID NO: 11620 - RNA, 76 nt, synthetic construct
  source 1..76: mol_type = other RNA
aaataaataaataaataaaaaaaaaaaaaaaaaaaaaaaaaaaaaaaaaaaaaataaataaatataaataaatata

SEQ ID NO: 11621 - RNA, 76 nt, synthetic construct
  source 1..76: mol_type = other RNA
aaataaataaataaataaaaaaaaaaaaaaaaaaaaaaaaaaaaaaaaaataaataaataaataaatataaatata

SEQ ID NO: 11622 - RNA, 76 nt, synthetic construct
  source 1..76: mol_type = other RNA
aaaaaaaaaaaaaaaaaaaaaataaaaaaaaaaaaaaaaaaaaaaaaaaaaaaaaaaaaaaaaaaaaaaaaatata

SEQ ID NO: 11623 - RNA, 76 nt, synthetic construct
  source 1..76: mol_type = other RNA
aaaaaaaaaaaaaaaaaaaaaaaaaaaaaaaaaaataaataaaaaaaaaaaaaaaaaaaaaaaaaaaataaatata

SEQ ID NO: 11624 - RNA, 76 nt, synthetic construct
  source 1..76: mol_type = other RNA
aaaaaaaaaaaaaaaaaaaaaaaaaaaaaaaaaaataaataaataaaaaaaaaaaaaaaaaaaaaaaataaatata

SEQ ID NO: 11625 - RNA, 76 nt, synthetic construct
  source 1..76: mol_type = other RNA
aaaaaaaaaaaaaaaaaaaatataaaaaaaaaaaaaaaaaaaaaaaaaaaaaaaaaaaaaaaaaaaaaaaaatata

SEQ ID NO: 11626 - RNA, 76 nt, synthetic construct
  source 1..76: mol_type = other RNA
aaaaaaaaaaaaaaaaaaaaaaaaaaaaaaaaaaataaatataaaaaaaaaaaaaaaaaaaaaaaaaataaatata

SEQ ID NO: 11627 - RNA, 76 nt, synthetic construct
  source 1..76: mol_type = other RNA
aaaaaaaaaaataaataaaaaaaaaaaaaaaaaaaaaaaaaaaaaaaaaaaaaataaataaataaatataaatata

SEQ ID NO: 11628 - RNA, 76 nt, synthetic construct
  source 1..76: mol_type = other RNA
aaaaaaaaaaataaataaaaaaaaaaaaaaaaaaaaaaaaaaaaaaaaaaaaaataaataaatataaataaatata

SEQ ID NO: 11629 - RNA, 76 nt, synthetic construct
  source 1..76: mol_type = other RNA
aaaaaaataaataaataaaaaaaaaaaaaaaaaaaaaaaaaaaaaaaaaaaaaataaataaataaatataaatata

SEQ ID NO: 11630 - RNA, 76 nt, synthetic construct
  source 1..76: mol_type = other RNA
aaataaataaataaataaaaaaaaaaaaaaaaaaaaaaaaaaaaaaaaaaaaaataaataaataaaaataaatata

SEQ ID NO: 11631 - RNA, 76 nt, synthetic construct
  source 1..76: mol_type = other RNA
aaataaataaataaataaaaaaaaaaaaaaaaaaaaaaaaaaaaaaaaaaaaaataaatatataaatataaatata

SEQ ID NO: 11632 - RNA, 76 nt, synthetic construct
  source 1..76: mol_type = other RNA
aaataaataaataaatataaataaataaaaaaaaaaaaaaaaaaaaaaaaaaaaaaaatataaataaataaataaa

SEQ ID NO: 11633 - RNA, 76 nt, synthetic construct
  source 1..76: mol_type = other RNA
aaataaataaatataaataaataaataaaaaaaaaaaaaaaaaaaaaaaaaaaaaaaatataaataaataaataaa

SEQ ID NO: 11634 - RNA, 76 nt, synthetic construct
  source 1..76: mol_type = other RNA
aaataaataaatataaataaataaataaaaaaaaaaaaaaaaaaaaaaaaaaaaaaaataaatataaataaataaa

SEQ ID NO: 11635 - RNA, 76 nt, synthetic construct
  source 1..76: mol_type = other RNA
aaataaataaataaatataaataaataaaaaaaaaaaaaaaaaaaaaaaaaaaaaaaataaatataaataaataaa

SEQ ID NO: 11636 - RNA, 76 nt, synthetic construct
  source 1..76: mol_type = other RNA
aaataaataaataaatataaataaataaataaaaaaaaaaaaaaaaaaaaaaaaaaaataaatataaataaataaa

SEQ ID NO: 11637 - RNA, 76 nt, synthetic construct
  source 1..76: mol_type = other RNA
aaataaataaataaatataaataaataaataaaaaaaaaaaaaaaaaaaaaaaaaaaatataaataaataaataaa

SEQ ID NO: 11638 - RNA, 76 nt, synthetic construct
  source 1..76: mol_type = other RNA
aaataaataaatataaataaataaataaataaaaaaaaaaaaaaaaaaaaaaaaaaaatataaataaataaataaa

SEQ ID NO: 11639 - RNA, 76 nt, synthetic construct
  source 1..76: mol_type = other RNA
aaataaataaatataaataaataaataaataaaaaaaaaaaaaaaaaaaaaaaaaaaataaatataaataaataaa

SEQ ID NO: 11640 - RNA, 76 nt, synthetic construct
  source 1..76: mol_type = other RNA
aaataaataaataaataaaaaaaaaaaaaaaaaaaaaaaaaaaaaaaaaaaaaataaataaatatatataaatata

SEQ ID NO: 11641 - RNA, 76 nt, synthetic construct
  source 1..76: mol_type = other RNA
aaaaaaaaaaaaaaaaaaaaaaaaaaaaaaaatataaataaatataaaaaaaaaaaaaaaaaaaaaaataaatata

SEQ ID NO: 11642 - RNA, 76 nt, synthetic construct
  source 1..76: mol_type = other RNA
aaaaaaaaaaaaaaaaaaaaaaaaaaaaaaataaatataaatataaataaataaataaaaaaaaaaaaaaaatata

SEQ ID NO: 11643 - RNA, 76 nt, synthetic construct
  source 1..76: mol_type = other RNA
aaaaaaaaaaaaaaaaaaaaaaaaaaaaaaataaatataaataaatataaataaataaaaaaaaaaaaaaaatata

SEQ ID NO: 11644 - RNA, 76 nt, synthetic construct
  source 1..76: mol_type = other RNA
aaaaaaaaaaaaaaaaaatatataaaaaaaaaaaaaaaaaaaaaaaaaaaaaaaaaaaaaaaaaaaaaaaaatata

SEQ ID NO: 11645 - RNA, 76 nt, synthetic construct
  source 1..76: mol_type = other RNA
aaaaaaaaaaaaaaaaaatatataaataaaaaaaaaaaaaaaaaaaaaaaaaaaaaaaaaaaaaaaaaaaaatata

SEQ ID NO: 11646 - RNA, 76 nt, synthetic construct
  source 1..76: mol_type = other RNA
aaataaaaaaataaataaaaaaaaaaaaaaaaaaaaaaaaaaaaaaaaaaaaaataaataaataaatataaatata

SEQ ID NO: 11647 - RNA, 76 nt, synthetic construct
  source 1..76: mol_type = other RNA
aaataaataaataaataaaaaaaaaaaaaaaaaaaaaaaaaaaaaaaaaaaaaataaaaaaataaatataaatata

SEQ ID NO: 11648 - RNA, 76 nt, synthetic construct
  source 1..76: mol_type = other RNA
aaataaataaaaaaataaaaaaaaaaaaaaaaaaaaaaaaaaaaaaaaaaaaaataaataaataaatataaatata

SEQ ID NO: 11649 - RNA, 76 nt, synthetic construct
  source 1..76: mol_type = other RNA
aaaaaaaaaaaaaaaaaaataaatataaataaataaataaataaataaataaatataaataaataaataaatatat

SEQ ID NO: 11650 - RNA, 76 nt, synthetic construct
  source 1..76: mol_type = other RNA
aaataaataaataaataaaaaaaaaaaaaaaaaataaaaaaaaaaaaaaaaaaataaataaataaatataaatata

SEQ ID NO: 11651 - RNA, 76 nt, synthetic construct
  source 1..76: mol_type = other RNA
aaataaataaataaataaaaaaaaaaaaaaaaaaataaaaaaaaaaaaaaaaaataaataaataaatataaatata

SEQ ID NO: 11652 - RNA, 76 nt, synthetic construct
  source 1..76: mol_type = other RNA
aaataaataaataaataaaaaaaaaaaaaaaaaataaaaaaaaaaaaaaaaaaataaataaatataaataaatata

SEQ ID NO: 11653 - RNA, 76 nt, synthetic construct
  source 1..76: mol_type = other RNA
aaataaataaataaataaaaaaaaaaaaaaaaaaataaaaaaaaaaaaaaaaaataaataaatataaataaatata

SEQ ID NO: 11654 - RNA, 76 nt, synthetic construct
  source 1..76: mol_type = other RNA
aaataaataaataaataaaaaaaaaaaaaaaaataaaaaaaaaaaaaaaaaaaataaataaataaatataaatata

SEQ ID NO: 11655 - RNA, 76 nt, synthetic construct
  source 1..76: mol_type = other RNA
aaataaataaataaataaaaaaaaaaaaaaaaataaaaaaaaaaaaaaaaaaaataaataaatataaataaatata

SEQ ID NO: 11656 - RNA, 76 nt, synthetic construct
  source 1..76: mol_type = other RNA
aaataaataaataaataaaaaaaaaaaaaaaaaaaaaaaaaaataaaaaaaaaataaataaataaatataaatata

SEQ ID NO: 11657 - RNA, 76 nt, synthetic construct
  source 1..76: mol_type = other RNA
aaataaataaataaataaaaaaaaaaaaaaaaaaaaaaaaaaaaaataaaaaaataaataaataaatataaatata

SEQ ID NO: 11658 - RNA, 76 nt, synthetic construct
  source 1..76: mol_type = other RNA
aaataaataaataaataaaaaaaaaaaaaaaaaaaaaaaaataaaaaaaaaaaataaataaataaatataaatata

SEQ ID NO: 11659 - RNA, 76 nt, synthetic construct
  source 1..76: mol_type = other RNA
aaataaataaataaataaaaaaaaaaataaaaaaaaaaaaaaaaaaaaaaaaaataaataaataaatataaatata

SEQ ID NO: 11660 - RNA, 76 nt, synthetic construct
  source 1..76: mol_type = other RNA
aaataaataaataaataaaaaaaaataaaaaaaaaaaaaaaaaaaaaaaaaaaataaataaataaatataaatata

SEQ ID NO: 11661 - RNA, 76 nt, synthetic construct
  source 1..76: mol_type = other RNA
aaataaataaataaataaaaaaaaaaaaaaataaaaaaaaaaaaaaaaaaaaaataaataaataaatataaatata

SEQ ID NO: 11662 - RNA, 76 nt, synthetic construct
  source 1..76: mol_type = other RNA
aaataaataaataaataaaaaaaaaaaaaaaaaaaaaaaaaataaaaaaaaaaataaataaataaatataaatata

SEQ ID NO: 11663 - RNA, 76 nt, synthetic construct
  source 1..76: mol_type = other RNA
aaataaataaataaataaaaataaaaaaaaaaaaaaaaaaaaaaaaaaaaaaaataaataaataaatataaatata

SEQ ID NO: 11664 - RNA, 76 nt, synthetic construct
  source 1..76: mol_type = other RNA
aaataaataaataaataaaaaaaaaataaaaaaaaaaaaaaaaaaaaaaaaaaataaataaataaatataaatata

SEQ ID NO: 11665 - RNA, 76 nt, synthetic construct
  source 1..76: mol_type = other RNA
aaataaataaataaataaaaaaaaaaaaaaaaaataaataaaaaaaaaaaaaaataaataaatataaataaatata

SEQ ID NO: 11666 - RNA, 76 nt, synthetic construct
  source 1..76: mol_type = other RNA
aaataaataaataaataaaaaaaaaaaaaaaaaataaataaaaaaaaaaaaaaataaataaataaatataaatata

SEQ ID NO: 11667 - RNA, 76 nt, synthetic construct
  source 1..76: mol_type = other RNA
aaataaaaaaaaaaaaaaaaaaaaaaataaataaataaaaaaaaaaaaaaaaaataaataaataaataaatatata

SEQ ID NO: 11668 - RNA, 76 nt, synthetic construct
  source 1..76: mol_type = other RNA
aaaataaaaaaaaaaaaaaaaaaaaaaaaaaaaaaaaaataaataaataaataaataaataaatataaataaatat

SEQ ID NO: 11669 - RNA, 76 nt, synthetic construct
  source 1..76: mol_type = other RNA
aaaataaaaaaaaaaaaaaaaaaaaaaaaaaaaaataaataaataaataaataaataaataaatataaataaatat

SEQ ID NO: 11670 - RNA, 76 nt, synthetic construct
  source 1..76: mol_type = other RNA
aaaataaaaaaaaaaaaaaaaaaaaaaaaaaaaaataaataaataaataaataaataaataaataaatataaatat

SEQ ID NO: 11671 - RNA, 76 nt, synthetic construct
  source 1..76: mol_type = other RNA
aaaataaataaaaaaaaaaaaaaaaaaaaaaaaaataaataaataaataaataaataaataaataaatataaatat

SEQ ID NO: 11672 - RNA, 76 nt, synthetic construct
  source 1..76: mol_type = other RNA
aaaataaataaaaaaaaaaaaaaaaaaaaaaaaaataaataaataaataaataaataaataaatataaataaatat

SEQ ID NO: 11673 - RNA, 76 nt, synthetic construct
  source 1..76: mol_type = other RNA
aaaataaaaaaaaaaaaaaaaaaaaaaaaaataaataaataaataaataaataaataaataaatataaataaatat

SEQ ID NO: 11674 - RNA, 76 nt, synthetic construct
  source 1..76: mol_type = other RNA
aaaaaaaaaaaaaaaaaaaaaaaaaaaaaaaaaaataaataaaaaaaaaaataaaaaaaaaaaaaaaataaatata

SEQ ID NO: 11675 - RNA, 76 nt, synthetic construct
  source 1..76: mol_type = other RNA
aaaaaaaaaaaaaaaaaaaaaaaaaaaaataaaaataaataaaaaaaaaaaaaaaaaaaaaaaaaaaataaatata

SEQ ID NO: 11676 - RNA, 76 nt, synthetic construct
  source 1..76: mol_type = other RNA
aaaaaaaaaaaaaaaaaaaaaaaaaaataaaaaaataaataaaaaaaaaaaaaaaaaaaaaaaaaaaataaatata

SEQ ID NO: 11677 - RNA, 76 nt, synthetic construct
  source 1..76: mol_type = other RNA
aaaaaaaaaaaaaaaaaaaaaaaaaaaaaaaaaaataaataaaataaaaaaaaaaaaaaaaaaaaaaataaatata

SEQ ID NO: 11678 - RNA, 76 nt, synthetic construct
  source 1..76: mol_type = other RNA
aaaaaaaaaaaaaaaaaaaaaaaaataaaaaaaaataaataaaaaaaaaaaaaaaaaaaaaaaaaaaataaatata

SEQ ID NO: 11679 - RNA, 76 nt, synthetic construct
  source 1..76: mol_type = other RNA
aaaaaaataaaaaaaaaaaaaaaaaaaaaaaaaaataaataaaaaaaaaaaaaaaaaaaaaaaaaaaataaatata

SEQ ID NO: 11680 - RNA, 76 nt, synthetic construct
  source 1..76: mol_type = other RNA
aaaaaaaaaaaaaaaaaaaaaaaaaaaaaaaaaaataaataaaaaaaaaataaaaaaaaaaaaaaaaataaatata

SEQ ID NO: 11681 - RNA, 76 nt, synthetic construct
  source 1..76: mol_type = other RNA
aaaaaaaaaaaaaaaaaaaaaaaaaaaaaaaaaaataaataaaaaaaaaaaaaaaaaaataaaaaaaataaatata

SEQ ID NO: 11682 - RNA, 76 nt, synthetic construct
  source 1..76: mol_type = other RNA
aaaaaataaaaaaaaaaaaaaaaaaaaaaaaaaaataaataaaaaaaaaaaaaaaaaaaaaaaaaaaataaatata

SEQ ID NO: 11683 - RNA, 76 nt, synthetic construct
  source 1..76: mol_type = other RNA
aaaaaaaaaaataaaaaaaaaaaaaaaaaaaaaaataaataaaaaaaaaaaaaaaaaaaaaaaaaaaataaatata

SEQ ID NO: 11684 - RNA, 76 nt, synthetic construct
  source 1..76: mol_type = other RNA
aaaaaaaaaaaaaaaaaaaaaaaaaaaaaataaaataaataaaaaaaaaaaaaaaaaaaaaaaaaaaataaatata

SEQ ID NO: 11685 - RNA, 76 nt, synthetic construct
  source 1..76: mol_type = other RNA
aaaataaataaataaaaaaaaaaaaaaaaaaaaaataaataaataaataaataaataaataaataaatataaatat

SEQ ID NO: 11686 - RNA, 76 nt, synthetic construct
  source 1..76: mol_type = other RNA
aaaataaataaataaaaaaaaaaaaaaaaaaaaaataaataaataaataaataaataaataaatataaataaatat

SEQ ID NO: 11687 - RNA, 76 nt, synthetic construct
  source 1..76: mol_type = other RNA
aaaaaaaaaaaaaaaaaaaaaaaaataaataaaaataaataaaaaaaaaaaaaaaaaaaaaaaaaaaataaatata

SEQ ID NO: 11688 - RNA, 76 nt, synthetic construct
  source 1..76: mol_type = other RNA
aaaataaataaataaataaaaaaaaaaaaaaaaaataaataaataaataaataaataaataaatataaataaatat

SEQ ID NO: 11689 - RNA, 76 nt, synthetic construct
  source 1..76: mol_type = other RNA
aaaataaataaataaataaaaaaaaaaaaaaaaaataaataaataaataaataaataaataaataaatataaatat

SEQ ID NO: 11690 - RNA, 76 nt, synthetic construct
  source 1..76: mol_type = other RNA
aaaaaaaaaaaaaaaaaaaaaaaaaaaaatataaatataaatataaataaataaataaaaaaaaaaaaaaaatata

SEQ ID NO: 11691 - RNA, 76 nt, synthetic construct
  source 1..76: mol_type = other RNA
aaaaaaaaaaaaaaaaaaaaaaaaaaaaatataaatataaataaatataaataaataaaaaaaaaaaaaaaatata

SEQ ID NO: 11692 - RNA, 76 nt, synthetic construct
  source 1..76: mol_type = other RNA
aaaaaaaaaaaatataaataaatataaataaataaataaataaataaatataaataaataaaaaaaaaaaaatata

SEQ ID NO: 11693 - RNA, 76 nt, synthetic construct
  source 1..76: mol_type = other RNA
aaaaaaaaaaaatataaataaatataaataaataaataaataaataaatataaataaataaataaaaaaaaatata

SEQ ID NO: 11694 - RNA, 76 nt, synthetic construct
  source 1..76: mol_type = other RNA
aaaaaaaaaaaatataaataaataaatataaataaataaataaataaatataaataaataaataaaaaaaaatata

SEQ ID NO: 11695 - RNA, 76 nt, synthetic construct
  source 1..76: mol_type = other RNA
aaaaaaaaaaaataaatataaatataaataaataaataaataaataaatataaataaataaataaaaaaaaatata

SEQ ID NO: 11696 - RNA, 76 nt, synthetic construct
  source 1..76: mol_type = other RNA
aaaaaaaaaaaataaataaatataaataaatataaataaataaataaatataaataaataaataaaaaaaaatata

SEQ ID NO: 11697 - RNA, 76 nt, synthetic construct
  source 1..76: mol_type = other RNA
aaaaaaaaaaaatataaataaataaataaatataaataaataaataaatataaataaataaataaaaaaaaatata

SEQ ID NO: 11698 - RNA, 76 nt, synthetic construct
  source 1..76: mol_type = other RNA
aaaaaaaaaaaataaataaatataaatataaataaataaataaataaatataaataaataaataaaaaaaaatata

SEQ ID NO: 11699 - RNA, 76 nt, synthetic construct
  source 1..76: mol_type = other RNA
aaaaaaaaaaaataaatataaataaataaatataaataaataaataaatataaataaataaataaaaaaaaatata

SEQ ID NO: 11700 - RNA, 76 nt, synthetic construct
  source 1..76: mol_type = other RNA
aaaaaaaaaaaataaatataaataaatataaataaataaataaataaatataaataaataaataaaaaaaaatata

SEQ ID NO: 11701 - RNA, 76 nt, synthetic construct
  source 1..76: mol_type = other RNA
aaaaaaaaaaaatataaataaatataaataaataaataaataaataaatataaataaataaataaaaataaatata

SEQ ID NO: 11702 - RNA, 76 nt, synthetic construct
  source 1..76: mol_type = other RNA
aaaaaaaaaaaataaatataaatataaataaataaataaataaataaatataaataaataaataaaaataaatata

SEQ ID NO: 11703 - RNA, 76 nt, synthetic construct
  source 1..76: mol_type = other RNA
aaaaaaaaaaaataaataaatataaataaatataaataaataaataaatataaataaataaataaaaataaatata

SEQ ID NO: 11704 - RNA, 76 nt, synthetic construct
  source 1..76: mol_type = other RNA
aaaaaaaaaaaatataaataaataaatataaataaataaataaataaatataaataaataaataaaaataaatata

SEQ ID NO: 11705 - RNA, 76 nt, synthetic construct
  source 1..76: mol_type = other RNA
aaaaaaaaaaaatataaataaataaataaatataaataaataaataaatataaataaataaataaaaataaatata

SEQ ID NO: 11706 - RNA, 76 nt, synthetic construct
  source 1..76: mol_type = other RNA
aaaaaaaaaaaatataaataaatataaataaataaataaataaataaatataaataaataaataaataaaaatata

SEQ ID NO: 11707 - RNA, 76 nt, synthetic construct
  source 1..76: mol_type = other RNA
aaataaataaataaataaaaaaaaaaaaaaaaatataaaaaaaaaaaaaaaaaataaataaatataaataaatata

SEQ ID NO: 11708 - RNA, 76 nt, synthetic construct
  source 1..76: mol_type = other RNA
aaataaataaataaataaaaaaaaaaaaaaaaatataaaaaaaaaaaaaaaaaataaataaataaatataaatata

SEQ ID NO: 11709 - RNA, 76 nt, synthetic construct
  source 1..76: mol_type = other RNA
aaataaataaataaataaaaaaaaaaaaaaaaaataaaaaaaaaaaaaaaaatataaataaatataaataaatata

SEQ ID NO: 11710 - RNA, 76 nt, synthetic construct
  source 1..76: mol_type = other RNA
aaataaataaataaataaaaaaaaaaaaaaaaaataaaaaaaaaaaaaaaaatataaataaataaatataaatata

SEQ ID NO: 11711 - RNA, 76 nt, synthetic construct
  source 1..76: mol_type = other RNA
aaataaataaataaataaaaaaaaaaaaaaaaaaataaaaaaaaaaaaaaaatataaataaataaatataaatata

SEQ ID NO: 11712 - RNA, 76 nt, synthetic construct
  source 1..76: mol_type = other RNA
aaataaataaataaataaaaaaaaaaaaaaaaatataaataaaaaaaaaaaaaataaataaatataaataaatata

SEQ ID NO: 11713 - RNA, 76 nt, synthetic construct
  source 1..76: mol_type = other RNA
aaataaataaataaataaaaaaaaaaaaaaaatataaataaaaaaaaaaaaaaataaataaatataaataaatata

SEQ ID NO: 11714 - RNA, 76 nt, synthetic construct
  source 1..76: mol_type = other RNA
aaataaataaataaataaaaaaaaaaaaaaaaaataaataaaaaaaaaaaaatataaataaataaatataaatata

SEQ ID NO: 11715 - RNA, 76 nt, synthetic construct
  source 1..76: mol_type = other RNA
aaataaataaataaataaaaaaaaaaaaaaaatataaataaaaaaaaaaaaaaataaataaataaatataaatata

SEQ ID NO: 11716 - RNA, 76 nt, synthetic construct
  source 1..76: mol_type = other RNA
aaataaataaataaataaaaaaaaaaaaaaaaaataaataaaaaaaaaaaaatataaataaatataaataaatata

SEQ ID NO: 11717 - RNA, 76 nt, synthetic construct
  source 1..76: mol_type = other RNA
aaaaataaataaaaaaaaaaaaaaaaaaaaaaaaaaaatataaataaataaataaataaataaatataaatatata

SEQ ID NO: 11718 - RNA, 76 nt, synthetic construct
  source 1..76: mol_type = other RNA
aaaaaaaaaaaaaaaaaaaaaaaaaaaaaaaaaaataaataataaaaaaaaaaaaaaaaaaaaaaaaataaatata

SEQ ID NO: 11719 - RNA, 76 nt, synthetic construct
  source 1..76: mol_type = other RNA
aaaaaaaaaaaaaaaaaaaaaaaaaaaaaaaaaaataaataaaaaaaaaaaaaaaaaaaaaaaaataataaatata

SEQ ID NO: 11720 - RNA, 76 nt, synthetic construct
  source 1..76: mol_type = other RNA
aaaaaaaaaaaaaaaaaaaaaaaaaaaaaaaataataaataaaaaaaaaaaaaaaaaaaaaaaaaaaataaatata

SEQ ID NO: 11721 - RNA, 76 nt, synthetic construct
  source 1..76: mol_type = other RNA
aaaaaaaaaaaaaaaaaatatataaaaaaaaaaaaaaaaaaaaaaaaaaaaaaaaaaaaaaaaaaaaaaatatata

SEQ ID NO: 11722 - RNA, 77 nt, synthetic construct
  source 1..77: mol_type = other RNA
aaaaaaaaaaaaaaaaaaaaaatataaatataaataaaaaaaaaaaaaaaaaaaaaaaaaaaaaaaaaaaaaatata

SEQ ID NO: 11723 - RNA, 77 nt, synthetic construct
  source 1..77: mol_type = other RNA
aaaaaaaaaaaaaaaaaataaatataaatataaataaaaaaaaaaaaaaaaaaaaaaaaaaaaaaaaaaaaaatata

SEQ ID NO: 11724 - RNA, 77 nt, synthetic construct
  source 1..77: mol_type = other RNA
aaataaataaaaaaaaaaaaaaaaaaaaaaaaaaaaaaataaaaaaaaaaaaaaaaaaaaaaaaaaaaaaaaaataa

SEQ ID NO: 11725 - RNA, 77 nt, synthetic construct
  source 1..77: mol_type = other RNA
aaataaataaaaaaaaaaaaaaaaaaaaaaaaaaaaaaataaataaaaaaaaaaaaaaaaaaaaaaaaaaaaaataa

SEQ ID NO: 11726 - RNA, 77 nt, synthetic construct
  source 1..77: mol_type = other RNA
aaaaaaaaaaaaaaaaaaaaaaaaaaaaaaaaaaaaaataaatataaataaataaaaaaaaaaaataaataaataaa

SEQ ID NO: 11727 - RNA, 77 nt, synthetic construct
  source 1..77: mol_type = other RNA
aaataaataaaaaaaaaaaaaaaaaaaaaaaaaaataaataaataaaaaaaaaaaaaaaaaaaaaaaaaaaaaataa

SEQ ID NO: 11728 - RNA, 77 nt, synthetic construct
  source 1..77: mol_type = other RNA
aaataaataaataaaaaaaaaaaaaaaaaaaaaaaaaaataaataaaaaaaaaaaaaaaaaaaaaaaaaaaaaataa

SEQ ID NO: 11729 - RNA, 77 nt, synthetic construct
  source 1..77: mol_type = other RNA
aaataaataaaaaaaaaaaaaaaaaaaaaaaaaaaaaaataaataaaaaaaaaaaaaaaaaaaaaaaaaataaataa

SEQ ID NO: 11730 - RNA, 77 nt, synthetic construct
  source 1..77: mol_type = other RNA
aaataaataaataaaaaaaaaaaaaaaaaaaaaaataaataaataaaaaaaaaaaaaaaaaaaaaaaaaaaaaataa

SEQ ID NO: 11731 - RNA, 77 nt, synthetic construct
  source 1..77: mol_type = other RNA
aaataaataaaaaaaaaaaaaaaaaaaaaaataaataaataaataaaaaaaaaaaaaaaaaaaaaaaaaaaaaataa

SEQ ID NO: 11732 - RNA, 77 nt, synthetic construct
  source 1..77: mol_type = other RNA
aaataaataaataaataaaaaaaaaaaaaaaaaaaaaaataaataaaaaaaaaaaaaaaaaaaaaaaaaaaaaataa

SEQ ID NO: 11733 - RNA, 77 nt, synthetic construct
  source 1..77: mol_type = other RNA
aaataaataaataaaaaaaaaaaaaaaaaaataaataaataaataaaaaaaaaaaaaaaaaaaaaaaaaaaaaataa

SEQ ID NO: 11734 - RNA, 77 nt, synthetic construct
  source 1..77: mol_type = other RNA
aaataaataaaaaaaaaaaaaaaaaaataaataaataaataaataaaaaaaaaaaaaaaaaaaaaaaaaaaaaataa

SEQ ID NO: 11735 - RNA, 77 nt, synthetic construct
  source 1..77: mol_type = other RNA
aaataaataaataaataaaaaaaaaaaaaaaaaaataaataaataaaaaaaaaaaaaaaaaaaaaaaaaaaaaataa

SEQ ID NO: 11736 - RNA, 77 nt, synthetic construct
  source 1..77: mol_type = other RNA
aaataaataaataaataaaaaaaaaaaaaaataaataaataaataaaaaaaaaaaaaaaaaaaaaaaaaaaaaataa

SEQ ID NO: 11737 - RNA, 77 nt, synthetic construct
  source 1..77: mol_type = other RNA
aaataaataaataaaaaaaaaaaaaaataaataaataaataaataaaaaaaaaaaaaaaaaaaaaaaaaaaaaataa

SEQ ID NO: 11738 - RNA, 77 nt, synthetic construct
  source 1..77: mol_type = other RNA
aaaaaaaaaaaaaaaataaataaaaaaaaaaaaaaaaaaaaaaaaaaaaaaaaaataaaaaaaaaaaaaaaaatata

SEQ ID NO: 11739 - RNA, 77 nt, synthetic construct
  source 1..77: mol_type = other RNA
aaaaaaaaaaaaaaaaaaaataaataaatataaatataaatataaataaataaaaaaaaaaaaaaaaaaaaaatata

SEQ ID NO: 11740 - RNA, 77 nt, synthetic construct
  source 1..77: mol_type = other RNA
aaaaaaaaaaaaaaaaaaaaaaaaaaataaatataaataaatataaataaataaataaataaataaatataaataat

SEQ ID NO: 11741 - RNA, 77 nt, synthetic construct
  source 1..77: mol_type = other RNA
aaataaataaaaaaaaaaaaaaaaaaaaaaaaaaaaaaataaataaaaaaaaaaaaaaaaaaaaaaaaaaataaata

SEQ ID NO: 11742 - RNA, 77 nt, synthetic construct
  source 1..77: mol_type = other RNA
aaataaataaaaaaaaaaaaaaaaaaaaaaaaaaataaataaataaaaaaaaaaaaaaaaaaaaaaaaaaaaaaata

SEQ ID NO: 11743 - RNA, 77 nt, synthetic construct
  source 1..77: mol_type = other RNA
aaataaataaataaaaaaaaaaaaaaaaaaaaaaataaataaataaaaaaaaaaaaaaaaaaaaaaaaaaaaaaata

SEQ ID NO: 11744 - RNA, 77 nt, synthetic construct
  source 1..77: mol_type = other RNA
aaataaataaaaaaaaaaaaaaaaaaaaaaaaaaataaataaataaaaaaaaaaaaaaaaaaaaaaaaaaataaata

SEQ ID NO: 11745 - RNA, 77 nt, synthetic construct
  source 1..77: mol_type = other RNA
aaataaataaataaaaaaaaaaaaaaaaaaaaaaataaataaataaaaaaaaaaaaaaaaaaaaaaaaaaataaata

SEQ ID NO: 11746 - RNA, 77 nt, synthetic construct
  source 1..77: mol_type = other RNA
aaataaataaaaaaaaaaaaaaaaaaaaaaaaaaataaataaataaaaaaaaaaaaaaaaaaaaaaataaataaata

SEQ ID NO: 11747 - RNA, 77 nt, synthetic construct
  source 1..77: mol_type = other RNA
aaataaataaaaaaaaaaaaaaaaaaaaaaataaataaataaataaaaaaaaaaaaaaaaaaaaaaaaaaataaata

SEQ ID NO: 11748 - RNA, 77 nt, synthetic construct
  source 1..77: mol_type = other RNA
aaataaataaataaaaaaaaaaaaaaaaaaataaataaataaataaaaaaaaaaaaaaaaaaaaaaaaaaaaaaata

SEQ ID NO: 11749 - RNA, 77 nt, synthetic construct
  source 1..77: mol_type = other RNA
aaataaataaataaaaaaaaaaaaaaaaaaataaataaataaataaaaaaaaaaaaaaaaaaaaaaaaaaataaata

SEQ ID NO: 11750 - RNA, 77 nt, synthetic construct
  source 1..77: mol_type = other RNA
aaataaataaataaaaaaaaaaaaaaaaaaaaaaataaataaataaaaaaaaaaaaaaaaaaaaaaataaataaata

SEQ ID NO: 11751 - RNA, 77 nt, synthetic construct
  source 1..77: mol_type = other RNA
aaataaataaataaataaaaaaaaaaaaaaaaaaataaataaataaaaaaaaaaaaaaaaaaaaaaaaaaataaata

SEQ ID NO: 11752 - RNA, 77 nt, synthetic construct
  source 1..77: mol_type = other RNA
aaataaataaataaaaaaaaaaaaaaaaaaataaataaataaataaaaaaaaaaaaaaaaaaaaaaataaataaata

SEQ ID NO: 11753 - RNA, 77 nt, synthetic construct
  source 1..77: mol_type = other RNA
aaataaataaataaataaaaaaaaaaaaaaaaaaataaataaataaaaaaaaaaaaaaaaaaaaaaataaataaata

SEQ ID NO: 11754 - RNA, 77 nt, synthetic construct
  source 1..77: mol_type = other RNA
aaataaataaaaaaaaaaaaaaaaaaaaaaaaaaaaaaaaaaataaaaaaaaaaaaaaaaaaaaaaaaaaaatataa

SEQ ID NO: 11755 - RNA, 77 nt, synthetic construct
  source 1..77: mol_type = other RNA
aaataaataaaaaaaaaaaaaaaaaaaaaaaaaaaaaaataaataaaaaaaaaaaaaaaaaaaaaaaaaaaatataa

SEQ ID NO: 11756 - RNA, 77 nt, synthetic construct
  source 1..77: mol_type = other RNA
aaataaatataaaaaaaaaaaaaaaaaaaaaaaaaaaaataaataaaaaaaaaaaaaaaaaaaaaaaaaaaaaataa

SEQ ID NO: 11757 - RNA, 77 nt, synthetic construct
  source 1..77: mol_type = other RNA
aaataaataaaaaaaaaaaaaaaaaaaaaaaaaaataaataaataaaaaaaaaaaaaaaaaaaaaaaaaaaatataa

SEQ ID NO: 11758 - RNA, 77 nt, synthetic construct
  source 1..77: mol_type = other RNA
aaataaatataaaaaaaaaaaaaaaaaaaaaaaaataaataaataaaaaaaaaaaaaaaaaaaaaaaaaaaaaataa

SEQ ID NO: 11759 - RNA, 77 nt, synthetic construct
  source 1..77: mol_type = other RNA
aaataaataaataaaaaaaaaaaaaaaaaaaaaaaaaaataaataaaaaaaaaaaaaaaaaaaaaaaaaaaatataa

SEQ ID NO: 11760 - RNA, 77 nt, synthetic construct
  source 1..77: mol_type = other RNA
aaataaataaataaaaaaaaaaaaaaaaaaaaaaataaataaataaaaaaaaaaaaaaaaaaaaaaaaaaaatataa

SEQ ID NO: 11761 - RNA, 77 nt, synthetic construct
  source 1..77: mol_type = other RNA
aaataaataaataaataaaaaaaaaaaaaaaaaaaaaaataaataaaaaaaaaaaaaaaaaaaaaaaaaaaatataa

SEQ ID NO: 11762 - RNA, 77 nt, synthetic construct
  source 1..77: mol_type = other RNA
aaataaataaaaaaaaaaaaaaaaaaaaaaataaataaataaataaaaaaaaaaaaaaaaaaaaaaaaaaaatataa

SEQ ID NO: 11763 - RNA, 77 nt, synthetic construct
  source 1..77: mol_type = other RNA
aaataaatataaaaaaaaaaaaaaaaaaaaataaataaataaataaaaaaaaaaaaaaaaaaaaaaaaaaaaaataa

SEQ ID NO: 11764 - RNA, 77 nt, synthetic construct
  source 1..77: mol_type = other RNA
aaataaataaaaaaaaaaaaaaaaaaataaataaataaataaataaaaaaaaaaaaaaaaaaaaaaaaaaaatataa

SEQ ID NO: 11765 - RNA, 77 nt, synthetic construct
  source 1..77: mol_type = other RNA
aaataaataaataaaaaaaaaaaaaaaaaaataaataaataaataaaaaaaaaaaaaaaaaaaaaaaaaaaatataa

SEQ ID NO: 11766 - RNA, 77 nt, synthetic construct
  source 1..77: mol_type = other RNA
aaataaataaataaataaaaaaaaaaaaaaaaaaataaataaataaaaaaaaaaaaaaaaaaaaaaaaaaaatataa

SEQ ID NO: 11767 - RNA, 77 nt, synthetic construct
  source 1..77: mol_type = other RNA
aaataaatataaaaaaaaaaaaaaaaataaataaataaataaataaaaaaaaaaaaaaaaaaaaaaaaaaaaaataa

SEQ ID NO: 11768 - RNA, 77 nt, synthetic construct
  source 1..77: mol_type = other RNA
aaataaataaaaaaaaaaaaaaaaatataaataaataaataaataaaaaaaaaaaaaaaaaaaaaaaaaaaaaataa

SEQ ID NO: 11769 - RNA, 77 nt, synthetic construct
  source 1..77: mol_type = other RNA
aaataaataaataaataaaaaaaaaaaaaaataaataaataaataaaaaaaaaaaaaaaaaaaaaaaaaaaatataa

SEQ ID NO: 11770 - RNA, 77 nt, synthetic construct
  source 1..77: mol_type = other RNA
aaataaataaataaaaaaaaaaaaaaataaataaataaataaataaaaaaaaaaaaaaaaaaaaaaaaaaaatataa

SEQ ID NO: 11771 - RNA, 77 nt, synthetic construct
  source 1..77: mol_type = other RNA
aaataaataaataaaaaaaaaaaaataaatataaataaataaataaaaaaaaaaaaaaaaaaaaaaaaaaaaaataa

SEQ ID NO: 11772 - RNA, 77 nt, synthetic construct
  source 1..77: mol_type = other RNA
aaataaataaataaataaaaaaaaaaataaataaataaataaataaaaaaaaaaaaaaaaaaaaaaaaaaaatataa

SEQ ID NO: 11773 - RNA, 77 nt, synthetic construct
  source 1..77: mol_type = other RNA
aaaaaaaaaaaaaaaaaaaaaaaaaaaaaataaataaataaaaaaaatatataaataaataaataaataaatatata

SEQ ID NO: 11774 - RNA, 77 nt, synthetic construct
  source 1..77: mol_type = other RNA
aaaaaaaaaaaaaaaaaaaaaaaaaaaaaataaataaataaaataaatatataaataaataaataaataaatatata

SEQ ID NO: 11775 - RNA, 77 nt, synthetic construct
  source 1..77: mol_type = other RNA
aaaaaaaaaaaaaaaaaaaaaaaaaaaaaataaataaataaataaaatatataaataaataaataaataaatatata

SEQ ID NO: 11776 - RNA, 77 nt, synthetic construct
  source 1..77: mol_type = other RNA
aaaaaaaaaaaaaaaaaaaaaaaaaataaataaataaataaaaaaaatatataaataaataaataaataaatatata

SEQ ID NO: 11777 - RNA, 77 nt, synthetic construct
  source 1..77: mol_type = other RNA
aaaaaaaaaaaaaaaataaatataaaaaaaaaaaaaaaaaaaaaaaaaaaaaaaaaaaaaaaaaaaaaaaaaataat

SEQ ID NO: 11778 - RNA, 77 nt, synthetic construct
  source 1..77: mol_type = other RNA
aaaaaaaaaaaataaataaatataaaaaaaaaaaaaaaaaaaaaaaaaaaaaaaaaaaaaaaaaaaaaaaaaataat

SEQ ID NO: 11779 - RNA, 77 nt, synthetic construct
  source 1..77: mol_type = other RNA
aaaaaaaaaaaaaaaataaatataaataaaaaaaaaaaaaaaaaaaaaaaaaaaaaaaaaaaaaaaaaaaaaataat

SEQ ID NO: 11780 - RNA, 77 nt, synthetic construct
  source 1..77: mol_type = other RNA
aaaaaaaaaaaaaaaataaataaaaaaaaaaaaaaaaaaaaaaaaaaaaaaaatataaaaaaaaaaaaaaaaatata

SEQ ID NO: 11781 - RNA, 77 nt, synthetic construct
  source 1..77: mol_type = other RNA
aaaaaaaaaaaaaaaataaataaaaaaaaaaaaaaaaaaaaaaaaaaaaaaaatataaataaaaaaaaaaaaatata

SEQ ID NO: 11782 - RNA, 77 nt, synthetic construct
  source 1..77: mol_type = other RNA
aaaaaaaaaaaaaaaataaataaaaaaaaaaaaaaaaaaaaaaaaaaaataaatataaataaaaaaaaaaaaatata

SEQ ID NO: 11783 - RNA, 77 nt, synthetic construct
  source 1..77: mol_type = other RNA
aaaaaaaaaaaaaaaataaataaaaaaaaaaaaaaaaaaaaaaaaaaaaaaaatataaataaataaaaaaaaatata

SEQ ID NO: 11784 - RNA, 77 nt, synthetic construct
  source 1..77: mol_type = other RNA
aaaaaaaaaaaataaataaataaaaaaaaaaaaaaaaaaaaaaaaaaaataaatataaataaaaaaaaaaaaatata

SEQ ID NO: 11785 - RNA, 77 nt, synthetic construct
  source 1..77: mol_type = other RNA
aaaaaaaaaaataaatataaataaaaaaaaaaaaaaaaaaaataaataaataaaaaaaaaaaaaaaaaaaaaatata

SEQ ID NO: 11786 - RNA, 77 nt, synthetic construct
  source 1..77: mol_type = other RNA
aaaaaaaaaaaataaataaataaataaaaaaaaaaaaaaaaaaaaaaaataaatataaataaaaaaaaaaaaatata

SEQ ID NO: 11787 - RNA, 77 nt, synthetic construct
  source 1..77: mol_type = other RNA
aaaaaaaaaaaataaataaataaataaataaaaaaaaaaaaaaaaaaaataaatataaataaaaaaaaaaaaatata

SEQ ID NO: 11788 - RNA, 77 nt, synthetic construct
  source 1..77: mol_type = other RNA
aaataaataaaaaaaaaaaaaaaaaaaaaaaaaaaaaaataaaaaaaaaaaaaaaaaaaaaaaaaaaaaaaaaaaaa

SEQ ID NO: 11789 - RNA, 77 nt, synthetic construct
  source 1..77: mol_type = other RNA
aaaaaaaaaaaataaataaaaaaaaaaataaataaataaatataaataaataaataaataaataaaaaataaatata

SEQ ID NO: 11790 - RNA, 77 nt, synthetic construct
  source 1..77: mol_type = other RNA
aaaaaaaaaaaataaataaaaaaaaaaataaataaataaataaatataaataaataaataaataaaaaataaatata

SEQ ID NO: 11791 - RNA, 77 nt, synthetic construct
  source 1..77: mol_type = other RNA
aaaaaaaaaaaataaataaaaaaataaataaataaataaatataaataaataaataaataaataaaaaataaatata

SEQ ID NO: 11792 - RNA, 77 nt, synthetic construct
  source 1..77: mol_type = other RNA
aaaaaaaaaaaaaaaaaaaaataaataaaaaaaaaaaaaaaaaaaaaaaaaaaaataaaaaaaaaaaaaaaaaataa

SEQ ID NO: 11793 - RNA, 77 nt, synthetic construct
  source 1..77: mol_type = other RNA
aaaaaaaaaaaaaaaaaaaaaatataaatataaatataaatataaataaataaaaaaaaaaaaaaaaaaaaaatata

SEQ ID NO: 11794 - RNA, 77 nt, synthetic construct
  source 1..77: mol_type = other RNA
aaaaaaaaaaaaaaaaaataaatataaatataaatataaatataaataaaaaaaaaaaaaaaaaaaaaaaaaatata

SEQ ID NO: 11795 - RNA, 77 nt, synthetic construct
  source 1..77: mol_type = other RNA
aaaaaaaaaaaaaaaaaataaatataaatataaatataaatataaataaataaaaaaaaaaaaaaaaaaaaaatata

SEQ ID NO: 11796 - RNA, 77 nt, synthetic construct
  source 1..77: mol_type = other RNA
aaaaaaaaaaaaaaaaaaaaaatataaatataaatataaatataaataaataaaaaaaaaaaaaaaaaataaatata

SEQ ID NO: 11797 - RNA, 77 nt, synthetic construct
  source 1..77: mol_type = other RNA
aaaaaaaaaaaaaaaaaaaaataaataaataaaaaaaaaaaaaaaaaaaaaaaaataaaaaaaaaaaaaaaaaataa

SEQ ID NO: 11798 - RNA, 77 nt, synthetic construct
  source 1..77: mol_type = other RNA
aaaaaaaaaaaaaaaaaaaaataaataaataaaaaaaaaaaaaaaaaaaaaaaaataaataaaaaaaaaaaaaataa

SEQ ID NO: 11799 - RNA, 77 nt, synthetic construct
  source 1..77: mol_type = other RNA
aaaaaaaaaaaaaaaaaaaaataaataaataaaaaaaaaaaaaaaaaaaaaaaaataaaaaaaaaaaaaataaataa

SEQ ID NO: 11800 - RNA, 77 nt, synthetic construct
  source 1..77: mol_type = other RNA
aaaaaaaaaaaaaaaaaaaaataaataaataaaaaaaaaaaaaaaaaaaaataaataaaaaaaaaaaaaaaaaataa

SEQ ID NO: 11801 - RNA, 77 nt, synthetic construct
  source 1..77: mol_type = other RNA
aaaaaaaaaaaaaaaaaaaaataaataaataaataaaaaaaaaaaaaaaaaaaaataaaaaaaaaaaaaaaaaataa

SEQ ID NO: 11802 - RNA, 77 nt, synthetic construct
  source 1..77: mol_type = other RNA
aaaaaaaaaaaaaaaaaaaaataaataaataaaaaaaaaaaaaaaaaaaaataaataaataaaaaaaaaaaaaataa

SEQ ID NO: 11803 - RNA, 77 nt, synthetic construct
  source 1..77: mol_type = other RNA
aaaaaaaaaaaaaaaaaaaaataaataaataaataaaaaaaaaaaaaaaaaaaaataaataaaaaaaaaaaaaataa

SEQ ID NO: 11804 - RNA, 77 nt, synthetic construct
  source 1..77: mol_type = other RNA
aaaaaaaaaaaaaaaaaaaaataaataaataaataaaaaaaaaaaaaaaaaaaaataaaaaaaaaaaaaataaataa

SEQ ID NO: 11805 - RNA, 77 nt, synthetic construct
  source 1..77: mol_type = other RNA
aaaaaaaaaaaaaaaaaaaaataaataaataaataaaaaaaaaaaaaaaaataaataaaaaaaaaaaaaaaaaataa

SEQ ID NO: 11806 - RNA, 77 nt, synthetic construct
  source 1..77: mol_type = other RNA
aaaaaaaaaaaaaaaaaaaaataaataaataaaaaaaaaaaaaaaaaaaaaaaaataaaaaaaaaataaataaataa

SEQ ID NO: 11807 - RNA, 77 nt, synthetic construct
  source 1..77: mol_type = other RNA
aaaaaaaaaaaaaaaaaaaaataaataaataaaaaaaaaaaaaaaaaaaaaaaaataaataaaaaaaaaataaataa

SEQ ID NO: 11808 - RNA, 77 nt, synthetic construct
  source 1..77: mol_type = other RNA
aaaaaaaaaaaaaaaaaaaaataaataaataaaaaaaaaaaaaaaaaaaaataaataaaaaaaaaaaaaataaataa

SEQ ID NO: 11809 - RNA, 77 nt, synthetic construct
  source 1..77: mol_type = other RNA
aaaaaaaaaaaaaaaaaaaaataaataaataaaaaaaaaaaaaaaaaaaaaaaaataaaaaaaaaaaaaaaaataaa

SEQ ID NO: 11810 - RNA, 77 nt, synthetic construct
  source 1..77: mol_type = other RNA
aaaaaaaaaaaaaaaaaaaaataaataaataaaaaaaaaaaaaaaaaaaaataaataaaaaaaaaataaataaataa

SEQ ID NO: 11811 - RNA, 77 nt, synthetic construct
  source 1..77: mol_type = other RNA
aaaaaaaaaaaaaaaaaaaaataaataaataaataaaaaaaaaaaaaaaaaaaaataaaaaaaaaataaataaataa

SEQ ID NO: 11812 - RNA, 77 nt, synthetic construct
  source 1..77: mol_type = other RNA
aaaaaaaaaaaaaaaaaaaaataaataaataaaaaaaaaaaaaaaaaaaaaaaaataaataaaaaataaataaataa

SEQ ID NO: 11813 - RNA, 77 nt, synthetic construct
  source 1..77: mol_type = other RNA
aaaaaaaaaaaaaaaaaaaaataaataaataaataaaaaaaaaaaaaaaaaaaaataaataaaaaaaaaataaataa

SEQ ID NO: 11814 - RNA, 77 nt, synthetic construct
  source 1..77: mol_type = other RNA
aaaaaaaaaaaaaaaaaaaaataaataaataaataaaaaaaaaaaaaaaaataaataaataaaaaaaaaaaaaataa

SEQ ID NO: 11815 - RNA, 77 nt, synthetic construct
  source 1..77: mol_type = other RNA
aaaaaaaaaaaaaaaaaaaaataaataaataaataaaaaaaaaaaaaaaaataaataaaaaaaaaaaaaataaataa

SEQ ID NO: 11816 - RNA, 77 nt, synthetic construct
  source 1..77: mol_type = other RNA
aaaaaaaaaaaaaaaaaaaaataaataaataaaaaaaaaaaaaaaaaaaaataaataaataaaaaaaaaataaataa

SEQ ID NO: 11817 - RNA, 77 nt, synthetic construct
  source 1..77: mol_type = other RNA
aaataaataaataaaaaaaaaaaaaaaaaaaaaaaaaaaaatataaaaaaaaaaaaaaaaaaaaaaaaaaataaata

SEQ ID NO: 11818 - RNA, 77 nt, synthetic construct
  source 1..77: mol_type = other RNA
aaaaaaaaaaaaaaaaaaaaataaataaataaaaaaaaaaaaaaaaaaaaaaaaataaataaaaaaaaaaaaataaa

SEQ ID NO: 11819 - RNA, 77 nt, synthetic construct
  source 1..77: mol_type = other RNA
aaaaaaaaaaaaaaaaaaaaataaataaataaataaaaaaaaaaaaaaaaaaaaataaaaaaaaaaaaaaaaataaa

SEQ ID NO: 11820 - RNA, 77 nt, synthetic construct
  source 1..77: mol_type = other RNA
aaaaaaaaaaaaaaaaaaaaataaataaataaataaaaaaaaaaaaaaaaaaaaataaataaaaaataaataaataa

SEQ ID NO: 11821 - RNA, 77 nt, synthetic construct
  source 1..77: mol_type = other RNA
aaaaaaaaaaaaaaaaaaaaataaataaataaataaaaaaaaaaaaaaaaataaataaaaaaaaaataaataaataa

SEQ ID NO: 11822 - RNA, 77 nt, synthetic construct
  source 1..77: mol_type = other RNA
aaaaaaaaaaaaaaaaaaaaataaataaataaaaaaaaaaaaaaaaaaaaataaataaataaaaaataaataaataa

SEQ ID NO: 11823 - RNA, 77 nt, synthetic construct
  source 1..77: mol_type = other RNA
aaaaaaaaaaaaaaaaaaaaataaataaataaataaaaaaaaaaaaaaaaataaataaataaaaaaaaaataaataa

SEQ ID NO: 11824 - RNA, 78 nt, synthetic construct
  source 1..78: mol_type = other RNA
aaaaaaaaaaaaaaaaaaaaaaaaaaaaaaaaaaaaaaaaaaaaaaaaataaatataaaaaaaaaaaaaaaaaatata

SEQ ID NO: 11825 - RNA, 78 nt, synthetic construct
  source 1..78: mol_type = other RNA
aaaaaaaaaaaaaaaaaaaaaaaaaaaaaaaaaataaatataaataaaaaaaaaaaaaaaaaaaaaaaaataaatata

SEQ ID NO: 11826 - RNA, 78 nt, synthetic construct
  source 1..78: mol_type = other RNA
aaaaaaaaaaaaaaaaaaaaaaaaaaaaaaaaaaaaaaaaaaaaaaatataaatataaaaaaaaaaaaaaaaaatata

SEQ ID NO: 11827 - RNA, 78 nt, synthetic construct
  source 1..78: mol_type = other RNA
aataaataaataaataaataaataaataaataaatataaaaaaaaaaaaaaaaaaaaaaaaaaaaaaaaaaaaatata

SEQ ID NO: 11828 - RNA, 78 nt, synthetic construct
  source 1..78: mol_type = other RNA
aaaaaaaaaaaaaaaaaaaaaaaaaaaaaaaaaataaatataaataaaaaaaaaaaaaaaaaaaaaaatataaatata

SEQ ID NO: 11829 - RNA, 78 nt, synthetic construct
  source 1..78: mol_type = other RNA
aaaaaaaaaaaaaaaaaaaaaaaaaaaaaaaaaatataaataaataaaaaaaaaaaaaaaaaaaaaaatataaatata

SEQ ID NO: 11830 - RNA, 78 nt, synthetic construct
  source 1..78: mol_type = other RNA
aataaataaataaataaataaataaataaataaatataaataaaaaaaaaaaaaaaaaaaaaaaaaaaaaaaaatata

SEQ ID NO: 11831 - RNA, 78 nt, synthetic construct
  source 1..78: mol_type = other RNA
aaaaaaaaaaaaaaaaaaaaaaaaaaaaaataaataaatataaataaaaaaaaaaaaaaaaaaaaaaatataaatata

SEQ ID NO: 11832 - RNA, 78 nt, synthetic construct
  source 1..78: mol_type = other RNA
aaaaaaaaaaaaaaaaaaaaaaaaaaaaaaaaaatataaataaataaaaaaaaaaaaaaaaaaataaatataaatata

SEQ ID NO: 11833 - RNA, 78 nt, synthetic construct
  source 1..78: mol_type = other RNA
aaaaaaaaaaaaaaaaaaaaaaaaaaaaaaaaaataaatataaataaaaaaaaaaaaaaaaaaataaatataaatata

SEQ ID NO: 11834 - RNA, 78 nt, synthetic construct
  source 1..78: mol_type = other RNA
aaaaaaaaaaaaaaaaaaaaaaaaaaaaaataaatataaataaataaaaaaaaaaaaaaaaaaaaaaatataaatata

SEQ ID NO: 11835 - RNA, 78 nt, synthetic construct
  source 1..78: mol_type = other RNA
aaaaaaaaaaaaaaaaaaaaaaaaaaaaaaaaaataaatataaataaataaaaaaaaaaaaaaaaaaatataaatata

SEQ ID NO: 11836 - RNA, 78 nt, synthetic construct
  source 1..78: mol_type = other RNA
aaaaaaaaaaaaaaaaaaaaaaaaaaaaaaaaaatataaataaataaataaaaaaaaaaaaaaaaaaatataaatata

SEQ ID NO: 11837 - RNA, 78 nt, synthetic construct
  source 1..78: mol_type = other RNA
aaaaaaaaaaaaaaaaaaaaaaaaaataaataaatataaataaataaaaaaaaaaaaaaaaaaaaaaatataaatata

SEQ ID NO: 11838 - RNA, 78 nt, synthetic construct
  source 1..78: mol_type = other RNA
aaaaaaaaaaaaaaaaaaaaaaaaaaaaaataaataaatataaataaataaaaaaaaaaaaaaaaaaatataaatata

SEQ ID NO: 11839 - RNA, 78 nt, synthetic construct
  source 1..78: mol_type = other RNA
aaaaaaaaaaaaaaaaaaaaaaaaaaaaaataaatataaataaataaaaaaaaaaaaaaaaaaataaatataaatata

SEQ ID NO: 11840 - RNA, 78 nt, synthetic construct
  source 1..78: mol_type = other RNA
aaaaaaaaaaaaaaaaaaaaaaaaaaaaaataaataaatataaataaaaaaaaaaaaaaaaaaataaatataaatata

SEQ ID NO: 11841 - RNA, 78 nt, synthetic construct
  source 1..78: mol_type = other RNA
aaaaaaaaaaaaaaaaaaaaaaaaaataaataaataaatataaataaaaaaaaaaaaaaaaaaaaaaatataaatata

SEQ ID NO: 11842 - RNA, 78 nt, synthetic construct
  source 1..78: mol_type = other RNA
aaaaaaaaaaaaaaaaaaaaaaaaaaaaaaaaaatataaataaataaataaaaaaaaaaaaaaataaatataaatata

SEQ ID NO: 11843 - RNA, 78 nt, synthetic construct
  source 1..78: mol_type = other RNA
aaaaaaaaaaaaaaaaaaaaaaaaaaaaaataaatataaataaataaataaaaaaaaaaaaaaaaaaatataaatata

SEQ ID NO: 11844 - RNA, 78 nt, synthetic construct
  source 1..78: mol_type = other RNA
aaaaaaaaaaaaaaaaaaaaaaaaaaaaaaaaaataaatataaataaataaaaaaaaaaaaaaataaatataaatata

SEQ ID NO: 11845 - RNA, 78 nt, synthetic construct
  source 1..78: mol_type = other RNA
aaaaaaaaaaaaaaaaaaaaaaaaaaaaaaaaaataaatataaataaataaataaaaaaaaaaaaaaatataaatata

SEQ ID NO: 11846 - RNA, 78 nt, synthetic construct
  source 1..78: mol_type = other RNA
aaaaaaaaaaaaaaaaaaaaaaaaaaaaaataaataaatataaataaataaaaaaaaaaaaaaataaatataaatata

SEQ ID NO: 11847 - RNA, 78 nt, synthetic construct
  source 1..78: mol_type = other RNA
aaaaaaaaaaaaaaaaaaaaaaaaaataaataaatataaataaataaataaaaaaaaaaaaaaaaaaatataaatata

SEQ ID NO: 11848 - RNA, 78 nt, synthetic construct
  source 1..78: mol_type = other RNA
aaaaaaaaaaaaaaaaaaaaaaaaaataaataaataaatataaataaataaaaaaaaaaaaaaaaaaatataaatata

SEQ ID NO: 11849 - RNA, 78 nt, synthetic construct
  source 1..78: mol_type = other RNA
aaaaaaaaaaaaaaaaaaaaaaaaaaaaaataaataaatataaataaataaataaaaaaaaaaaaaaatataaatata

SEQ ID NO: 11850 - RNA, 78 nt, synthetic construct
  source 1..78: mol_type = other RNA
aaaaaaaaaaaaaaaaaaaaaaaaaaaaaataaatataaataaataaataaaaaaaaaaaaaaataaatataaatata

SEQ ID NO: 11851 - RNA, 78 nt, synthetic construct
  source 1..78: mol_type = other RNA
aaaaaaaaaaaaaaaaaaaaaaaaaataaataaatataaataaataaaaaaaaaaaaaaaaaaataaatataaatata

SEQ ID NO: 11852 - RNA, 78 nt, synthetic construct
  source 1..78: mol_type = other RNA
aaaaaaaaaaaaaaaaaaaaaaaaaataaataaataaatataaataaaaaaaaaaaaaaaaaaataaatataaatata

SEQ ID NO: 11853 - RNA, 78 nt, synthetic construct
  source 1..78: mol_type = other RNA
aaaaaaaaaaaaaaaaaaaaaaaaaaaaaataaatataaataaataaataaataaaaaaaaaaaaaaatataaatata

SEQ ID NO: 11854 - RNA, 78 nt, synthetic construct
  source 1..78: mol_type = other RNA
aaaaaaaaaaaaaaaaaaaaaaaaaaaaaaaaaataaatataaataaataaataaaaaaaaaaataaatataaatata

SEQ ID NO: 11855 - RNA, 78 nt, synthetic construct
  source 1..78: mol_type = other RNA
aaaaaaaaaaaaaaaaaaaaaaaaaaaaaaaaaatataaataaataaataaataaaaaaaaaaataaatataaatata

SEQ ID NO: 11856 - RNA, 78 nt, synthetic construct
  source 1..78: mol_type = other RNA
aaaaaaaaaaaaaaaaaaaaaaaaaataaataaataaatataaataaataaataaaaaaaaaaaaaaatataaatata

SEQ ID NO: 11857 - RNA, 78 nt, synthetic construct
  source 1..78: mol_type = other RNA
aaaaaaaaaaaaaaaaaaaaaaaaaataaataaatataaataaataaataaaaaaaaaaaaaaataaatataaatata

SEQ ID NO: 11858 - RNA, 78 nt, synthetic construct
  source 1..78: mol_type = other RNA
aaaaaaaaaaaaaaaaaaaaaaaaaaaaaataaatataaataaataaataaataaaaaaaaaaataaatataaatata

SEQ ID NO: 11859 - RNA, 78 nt, synthetic construct
  source 1..78: mol_type = other RNA
aaaaaaaaaaaaaaaaaaaaaaaaaataaataaataaatataaataaataaaaaaaaaaaaaaataaatataaatata

SEQ ID NO: 11860 - RNA, 78 nt, synthetic construct
  source 1..78: mol_type = other RNA
aaaaaaaataaatataaataaataaaaaaaaaaaaaaaaaaaaaaaaaaaaaaaaataaatataaataaataaatata

SEQ ID NO: 11861 - RNA, 78 nt, synthetic construct
  source 1..78: mol_type = other RNA
aaaataaataaatataaataaataaaaaaaaaaaaaaaaaaaaaaaaaaaaaaaaataaatataaataaataaatata

SEQ ID NO: 11862 - RNA, 78 nt, synthetic construct
  source 1..78: mol_type = other RNA
aaataaataaatataaataaaaaaaaaaaaaaaaaaaaaaaaataaaaaaaaaaaaaaaaaaaaaaaaaaaaaatata

SEQ ID NO: 11863 - RNA, 78 nt, synthetic construct
  source 1..78: mol_type = other RNA
aaaaaaaaaaaaaaaaaaaaaaaaaaaaaaaaaaaaaaatatataaaaaaaaaaaaaaaaaaaaaaaaaaaaaatata

SEQ ID NO: 11864 - RNA, 78 nt, synthetic construct
  source 1..78: mol_type = other RNA
aaaataaataaatataaataaataaataaaaaaaaaaaaaaaaaaaaaaaaaaaaataaatataaataaataaatata

SEQ ID NO: 11865 - RNA, 78 nt, synthetic construct
  source 1..78: mol_type = other RNA
aaaataaataaatataaataaataaaaaaaaaaaaaaaaaaaaaaaaaaaaataaataaatataaataaataaatata

SEQ ID NO: 11866 - RNA, 78 nt, synthetic construct
  source 1..78: mol_type = other RNA
aaaaaaaaaaaaaaaaaaaaaaaaaaaaaaaaaaataaatatataaaaaaaaaaaaaaaaaaaaaaaaaaaaaatata

SEQ ID NO: 11867 - RNA, 78 nt, synthetic construct
  source 1..78: mol_type = other RNA
aaataaataaatataaataaataaaaaaaaaaaaaaaaaaaaataaaaaaaaaaaaaaaaaaaaaaaaaaaaaatata

SEQ ID NO: 11868 - RNA, 78 nt, synthetic construct
  source 1..78: mol_type = other RNA
aaataaataaatataaataaaaaaaaaaaaaaaaaaaaaaaaataaataaaaaaaaaaaaaaaaaaaaaaaaaatata

SEQ ID NO: 11869 - RNA, 78 nt, synthetic construct
  source 1..78: mol_type = other RNA
aaaataaataaatataaataaataaataaaaaaaaaaaaaaaaaaaaaaaaataaataaatataaataaataaatata

SEQ ID NO: 11870 - RNA, 78 nt, synthetic construct
  source 1..78: mol_type = other RNA
aaataaataaatataaataaataaaaaaaaaaaaaaaaaaaaataaataaaaaaaaaaaaaaaaaaaaaaaaaatata

SEQ ID NO: 11871 - RNA, 78 nt, synthetic construct
  source 1..78: mol_type = other RNA
aaaaaaaaaaaaaataaataaaaaaaaaaaaaaaaaaaaaaaaaaaaaaaaaaaaaaaaaaaaaaatataaatatata

SEQ ID NO: 11872 - RNA, 78 nt, synthetic construct
  source 1..78: mol_type = other RNA
aaaaaaaaaaaaaataaataaataaaaaaaaaaaaaaaaaaaaaaaaaaaaaaaaaaaaaaaaaaatataaatatata

SEQ ID NO: 11873 - RNA, 78 nt, synthetic construct
  source 1..78: mol_type = other RNA
aaaaaaaaaaaaaaaaaaaaaaaaaaaaaaaaaatataaataaataaaaaaaaaaaaaaaaaaaaaaataaatatata

SEQ ID NO: 11874 - RNA, 78 nt, synthetic construct
  source 1..78: mol_type = other RNA
aaaaaaaaaaaaaaaaaaaaaaaaaaaaaaaaaataaatataaataaaaaaaaaaaaaaaaaaaaaaataaatatata

SEQ ID NO: 11875 - RNA, 78 nt, synthetic construct
  source 1..78: mol_type = other RNA
aaaaaaaaaaaaaaaaaaaaaaaaaaaaaaaaaaaaaaaaaaaaaaaaaatataaataaataaaaaaaaaaaaaataa

SEQ ID NO: 11876 - RNA, 78 nt, synthetic construct
  source 1..78: mol_type = other RNA
aaaaaaaaaaaaaaaaaaaaaaaaaaaaaataaatataaataaataaaaaaaaaaaaaaaaaaaaaaataaatatata

SEQ ID NO: 11877 - RNA, 78 nt, synthetic construct
  source 1..78: mol_type = other RNA
aaaaaaaaaaaaaaaaaaaaaaaaaaaaaaaaaatataaataaataaaaaaaaaaaaaaaaaaataaataaatatata

SEQ ID NO: 11878 - RNA, 78 nt, synthetic construct
  source 1..78: mol_type = other RNA
aaaaaaaaaaaaaaaaaaaaaaaaaaaaaaaaaataaatataaataaaaaaaaaaaaaaaaaaataaataaatatata

SEQ ID NO: 11879 - RNA, 78 nt, synthetic construct
  source 1..78: mol_type = other RNA
aaaaaaaaaaaaaaaaaaaaaaaaaaaaaataaataaatataaataaaaaaaaaaaaaaaaaaaaaaataaatatata

SEQ ID NO: 11880 - RNA, 78 nt, synthetic construct
  source 1..78: mol_type = other RNA
aaaaaaaaaaaaaaaaaaaaaaaaaaaaaaaaaataaatataaataaataaaaaaaaaaaaaaaaaaataaatatata

SEQ ID NO: 11881 - RNA, 78 nt, synthetic construct
  source 1..78: mol_type = other RNA
aaaaaaaaaaaaaaaaaaaaaaaaaaaaaaaaaatataaataaataaataaaaaaaaaaaaaaaaaaataaatatata

SEQ ID NO: 11882 - RNA, 78 nt, synthetic construct
  source 1..78: mol_type = other RNA
aaaaaaaaaaaaaaaaaaaaaaaaaaaaaaaaaaaaaaaaaaaaaaaaaatataaataaataaaaaaaaaataaataa

SEQ ID NO: 11883 - RNA, 78 nt, synthetic construct
  source 1..78: mol_type = other RNA
aaaaaaaaaaaaaaaaaaaaaaaaaaaaaaaaaaaaaaaaaaaaaataaatataaataaataaaaaaaaaaaaaataa

SEQ ID NO: 11884 - RNA, 78 nt, synthetic construct
  source 1..78: mol_type = other RNA
aaaaaaaaaaaaaaaaaaaaaaaaaaaaaaaaaaaaaaaaaaaaaaaaaataaatataaataaaaaaaaaataaataa

SEQ ID NO: 11885 - RNA, 78 nt, synthetic construct
  source 1..78: mol_type = other RNA
aaaaaaaaaaaaaaaaaaaaaaaaaaaaaaaaaaaaaaaaaaaaaataaataaatataaataaaaaaaaaaaaaataa

SEQ ID NO: 11886 - RNA, 78 nt, synthetic construct
  source 1..78: mol_type = other RNA
aaaaaaaaaaaaaaaaaaaaaaaaaaaaaaaaaaaaaaaaaaaaaaaaaatataaataaataaataaaaaaaaaataa

SEQ ID NO: 11887 - RNA, 78 nt, synthetic construct
  source 1..78: mol_type = other RNA
aaataaataaataaataaataaataaaaaaaaaaaaaaaaaaaaaaaaataaataaatataaataaaaaaaaaatata

SEQ ID NO: 11888 - RNA, 78 nt, synthetic construct
  source 1..78: mol_type = other RNA
aaataaataaataaataaataaataaaaaaaaaaaaaaaaaaaaaaaaataaataaataaatataaaaaaaaaatata

SEQ ID NO: 11889 - RNA, 78 nt, synthetic construct
  source 1..78: mol_type = other RNA
aaaaaaaaaaaaaaaaaaaaaaaaaaaaaataaataaatataaataaaaaaaaaaaaaaaaaaataaataaatatata

SEQ ID NO: 11890 - RNA, 78 nt, synthetic construct
  source 1..78: mol_type = other RNA
aaaaaaaaaaaaaaaaaaaaaaaaaaaaaaaaaatataaataaataaataaaaaaaaaaaaaaataaataaatatata

SEQ ID NO: 11891 - RNA, 78 nt, synthetic construct
  source 1..78: mol_type = other RNA
aaaaaaaaaaaaaaaaaaaaaaaaaaaaaataaatataaataaataaaaaaaaaaaaaaaaaaataaataaatatata

SEQ ID NO: 11892 - RNA, 78 nt, synthetic construct
  source 1..78: mol_type = other RNA
aaaaaaaaaaaaaaaaaaaaaaaaaaaaaaaaaataaatataaataaataaaaaaaaaaaaaaataaataaatatata

SEQ ID NO: 11893 - RNA, 78 nt, synthetic construct
  source 1..78: mol_type = other RNA
aaaaaaaaaaaaaaaaaaaaaaaaaataaataaataaatataaataaaaaaaaaaaaaaaaaaaaaaataaatatata

SEQ ID NO: 11894 - RNA, 78 nt, synthetic construct
  source 1..78: mol_type = other RNA
aaaaaaaaaaaaaaaaaaaaaaaaaataaataaatataaataaataaaaaaaaaaaaaaaaaaaaaaataaatatata

SEQ ID NO: 11895 - RNA, 78 nt, synthetic construct
  source 1..78: mol_type = other RNA
aaaaaaaaaaaaaaaaaaaaaaaaaaaaaaaaaatataaataaataaaaaaaaaaaaaaataaataaataaatatata

SEQ ID NO: 11896 - RNA, 78 nt, synthetic construct
  source 1..78: mol_type = other RNA
aaaaaaaaaaaaaaaaaaaaaaaaaaaaaataaatataaataaataaataaaaaaaaaaaaaaaaaaataaatatata

SEQ ID NO: 11897 - RNA, 78 nt, synthetic construct
  source 1..78: mol_type = other RNA
aaaaaaaaaaaaaaaaaaaaaaaaaaaaaaaaaataaatataaataaaaaaaaaaaaaaataaataaataaatatata

SEQ ID NO: 11898 - RNA, 78 nt, synthetic construct
  source 1..78: mol_type = other RNA
aaaaaaaaaaaaaaaaaaaaaaaaaaaaaaaaaataaatataaataaataaataaaaaaaaaaaaaaataaatatata

SEQ ID NO: 11899 - RNA, 78 nt, synthetic construct
  source 1..78: mol_type = other RNA
aaaaaaaaaaaaaaaaaaaaaaaaaaaaaataaataaatataaataaataaaaaaaaaaaaaaaaaaataaatatata

SEQ ID NO: 11900 - RNA, 78 nt, synthetic construct
  source 1..78: mol_type = other RNA
aaaaaaaaaaaaaaaaaaaaaaaaaaaaaaaaaaaaaaaaaaaaaataaatataaataaataaaaaaaaaataaataa

SEQ ID NO: 11901 - RNA, 78 nt, synthetic construct
  source 1..78: mol_type = other RNA
aaaaaaaaaaaaaaaaaaaaaaaaaaaaaaaaaaaaaaaaaaaaaataaataaatataaataaaaaaaaaataaataa

SEQ ID NO: 11902 - RNA, 78 nt, synthetic construct
  source 1..78: mol_type = other RNA
aaaaaaaaaaaaaaaaaaaaaaaaaaaaaaaaaaaaaaaaaataaataaatataaataaataaaaaaaaaaaaaataa

SEQ ID NO: 11903 - RNA, 78 nt, synthetic construct
  source 1..78: mol_type = other RNA
aaataaataaataaataaataaataaaaaaaaaaaaaaaaaaaaaaaaataaataaatataaataaataaaaaatata

SEQ ID NO: 11904 - RNA, 78 nt, synthetic construct
  source 1..78: mol_type = other RNA
aaataaataaataaataaataaataaaaaaaaaaaaaaaaaaaaaaaaataaataaataaatataaaaaataaatata

SEQ ID NO: 11905 - RNA, 78 nt, synthetic construct
  source 1..78: mol_type = other RNA
aaataaataaataaataaataaataaataaaaaaaaaaaaaaaaaaaaataaataaatataaataaaaaaaaaatata

SEQ ID NO: 11906 - RNA, 78 nt, synthetic construct
  source 1..78: mol_type = other RNA
aaataaataaataaataaataaataaaaaaaaaaaaaaaaaaaaaaaaataaataaatataaataaaaaataaatata

SEQ ID NO: 11907 - RNA, 78 nt, synthetic construct
  source 1..78: mol_type = other RNA
aaataaataaataaataaataaataaaaaaaaaaaaaaaaaaaaataaataaataaataaatataaaaaaaaaatata

SEQ ID NO: 11908 - RNA, 78 nt, synthetic construct
  source 1..78: mol_type = other RNA
aaataaataaataaataaataaataaaaaaaaaaaaaaaaaaaaataaataaataaatataaataaaaaaaaaatata

SEQ ID NO: 11909 - RNA, 78 nt, synthetic construct
  source 1..78: mol_type = other RNA
aaataaataaataaataaataaataaaaaaaaaaaaaaaaaaaaaaaaataaataaataaatataaataaaaaatata

SEQ ID NO: 11910 - RNA, 78 nt, synthetic construct
  source 1..78: mol_type = other RNA
aaataaataaataaataaataaataaataaaaaaaaaaaaaaaaaaaaataaataaataaatataaaaaaaaaatata

SEQ ID NO: 11911 - RNA, 78 nt, synthetic construct
  source 1..78: mol_type = other RNA
aaaaaaaaaaaaaaaaaaaaaaaaaataaataaataaatataaataaaaaaaaaaaaaaaaaaataaataaatatata

SEQ ID NO: 11912 - RNA, 78 nt, synthetic construct
  source 1..78: mol_type = other RNA
aaaaaaaaaaaaaaaaaaaaaaaaaaaaaaaaaatataaataaataaataaataaaaaaaaaaataaataaatatata

SEQ ID NO: 11913 - RNA, 78 nt, synthetic construct
  source 1..78: mol_type = other RNA
aaaaaaaaaaaaaaaaaaaaaaaaaaaaaataaataaatataaataaataaataaaaaaaaaaaaaaataaatatata

SEQ ID NO: 11914 - RNA, 78 nt, synthetic construct
  source 1..78: mol_type = other RNA
aaaaaaaaaaaaaaaaaaaaaaaaaaaaaaaaaataaatataaataaataaataaaaaaaaaaataaataaatatata

SEQ ID NO: 11915 - RNA, 78 nt, synthetic construct
  source 1..78: mol_type = other RNA
aaaaaaaaaaaaaaaaaaaaaaaaaataaataaatataaataaataaataaaaaaaaaaaaaaaaaaataaatatata

SEQ ID NO: 11916 - RNA, 78 nt, synthetic construct
  source 1..78: mol_type = other RNA
aaaaaaaaaaaaaaaaaaaaaaaaaataaataaatataaataaataaaaaaaaaaaaaaaaaaataaataaatatata

SEQ ID NO: 11917 - RNA, 78 nt, synthetic construct
  source 1..78: mol_type = other RNA
aaaaaaaaaaaaaaaaaaaaaaaaaaaaaataaataaatataaataaataaaaaaaaaaaaaaataaataaatatata

SEQ ID NO: 11918 - RNA, 78 nt, synthetic construct
  source 1..78: mol_type = other RNA
aaaaaaaaaaaaaaaaaaaaaaaaaaaaaaaaaatataaataaataaataaaaaaaaaaataaataaataaatatata

SEQ ID NO: 11919 - RNA, 78 nt, synthetic construct
  source 1..78: mol_type = other RNA
aaaaaaaaaaaaaaaaaaaaaaaaaaaaaataaatataaataaataaataaaaaaaaaaaaaaataaataaatatata

SEQ ID NO: 11920 - RNA, 78 nt, synthetic construct
  source 1..78: mol_type = other RNA
aaaaaaaaaaaaaaaaaaaaaaaaaaaaaataaatataaataaataaaaaaaaaaaaaaataaataaataaatatata

SEQ ID NO: 11921 - RNA, 78 nt, synthetic construct
  source 1..78: mol_type = other RNA
aaaaaaaaaaaaaaaaaaaaaaaaaataaataaataaatataaataaataaaaaaaaaaaaaaaaaaataaatatata

SEQ ID NO: 11922 - RNA, 78 nt, synthetic construct
  source 1..78: mol_type = other RNA
aaaaaaaaaaaaaaaaaaaaaaaaaaaaaaaaaaaaaaaaaaaaaaaaaatataaataaataaaaaaaaaaaaataaa

SEQ ID NO: 11923 - RNA, 78 nt, synthetic construct
  source 1..78: mol_type = other RNA
aaaaaaaaaaaaaaaaaaaaaaaaaaaaaaaaaaaaaaaaaataaataaatataaataaataaaaaaaaaataaataa

SEQ ID NO: 11924 - RNA, 78 nt, synthetic construct
  source 1..78: mol_type = other RNA
aaaaaaaaaaaaaaaaaaaaaaaaaaaaaaaaaaaaaaaaaataaataaataaatataaataaaaaaaaaataaataa

SEQ ID NO: 11925 - RNA, 79 nt, synthetic construct
  source 1..79: mol_type = other RNA
aaataaaaaaaaaaaaaaaaaaaaaaaaaaataaataaataaataaatataaataaataaataaataaatataaatata

SEQ ID NO: 11926 - RNA, 79 nt, synthetic construct
  source 1..79: mol_type = other RNA
aaataaaaaaaaaaaaaaaaaaaaaaataaataaataaataaataaatataaataaataaataaataaatataaatata

SEQ ID NO: 11927 - RNA, 79 nt, synthetic construct
  source 1..79: mol_type = other RNA
aaataaaaaaaaaaaaaaaaaaataaataaataaataaataaataaatataaataaataaataaataaatataaatata

SEQ ID NO: 11928 - RNA, 79 nt, synthetic construct
  source 1..79: mol_type = other RNA
aaaaaaaaaaaaaataaataaataaataaataaataaataaaaaaaaaaaaaaaaaaaaaaaaaaaaaaaaaaaataaa

SEQ ID NO: 11929 - RNA, 79 nt, synthetic construct
  source 1..79: mol_type = other RNA
aaataaatataaataaatataaatataaataaataaataaataaataaaaaaaaaaaaaaaaaaaaaaaaaaaaatata

SEQ ID NO: 11930 - RNA, 79 nt, synthetic construct
  source 1..79: mol_type = other RNA
aaataaatataaataaatataaatataaataaataaataaataaataaataaaaaaaaaaaaaaaaaaaaaaaaatata

SEQ ID NO: 11931 - RNA, 79 nt, synthetic construct
  source 1..79: mol_type = other RNA
aaataaaaaaaaaaaaaaaaaaaaaaaaatataaataaataaataaatataaataaataaataaataaatataaatata

SEQ ID NO: 11932 - RNA, 79 nt, synthetic construct
  source 1..79: mol_type = other RNA
aaataaaaaaaaaaaaaaaaaaaaaaaaataaatataaataaataaatataaataaataaataaataaatataaatata

SEQ ID NO: 11933 - RNA, 79 nt, synthetic construct
  source 1..79: mol_type = other RNA
aaataaatataaataaatataaatataaataaataaataaataaataaataaaaaaaaaaaaaaaaaaaaataaatata

SEQ ID NO: 11934 - RNA, 79 nt, synthetic construct
  source 1..79: mol_type = other RNA
aaataaatataaataaatataaatataaataaataaataaataaataaataaataaaaaaaaaaaaaaaaaaaaatata

SEQ ID NO: 11935 - RNA, 79 nt, synthetic construct
  source 1..79: mol_type = other RNA
aaataaaaaaaaaaaaaaaaaaaaatataaataaataaataaataaatataaataaataaataaataaatataaatata

SEQ ID NO: 11936 - RNA, 79 nt, synthetic construct
  source 1..79: mol_type = other RNA
aaataaatataaataaatataaatataaataaataaataaataaataaataaaaaaaaaaaaaaaaataaataaatata

SEQ ID NO: 11937 - RNA, 79 nt, synthetic construct
  source 1..79: mol_type = other RNA
aaataaatataaataaatataaatataaataaataaataaataaataaataaataaaaaaaaaaaaaaaaataaatata

SEQ ID NO: 11938 - RNA, 79 nt, synthetic construct
  source 1..79: mol_type = other RNA
aaataaatataaataaatataaatataaataaataaataaataaataaataaataaaaaaaaaaaaataaataaatata

SEQ ID NO: 11939 - RNA, 79 nt, synthetic construct
  source 1..79: mol_type = other RNA
aaaaaaaaaaaaaaaaaaaaaaaaaaaaaaaaaaataaataaataaaaaaaaaaaaaaaaaaaaaataaatataaataa

SEQ ID NO: 11940 - RNA, 79 nt, synthetic construct
  source 1..79: mol_type = other RNA
aaaaaaaaaaaaaaaaaaaaaaaaaaaaaaataaataaataaataaaaaaaaaaaaaaaaaaaaaataaatataaataa

SEQ ID NO: 11941 - RNA, 79 nt, synthetic construct
  source 1..79: mol_type = other RNA
aaaaaaaaaaaaaaaaaaaaaaaaaaaaaaaaaaataaataaataaaaaaaaaaaaaaaaaataaataaatataaataa

SEQ ID NO: 11942 - RNA, 79 nt, synthetic construct
  source 1..79: mol_type = other RNA
aaataaatataaataaatataaatataaataaataaataaataaatataaaaaaaaaaaaaaaaaaaaaaaaaaatata

SEQ ID NO: 11943 - RNA, 79 nt, synthetic construct
  source 1..79: mol_type = other RNA
aaataaaaaaaaaaaaaaaaaaaaaaaaaaataaataaataaataaatataaataaatataaatataaatataaatata

SEQ ID NO: 11944 - RNA, 79 nt, synthetic construct
  source 1..79: mol_type = other RNA
aaataaaaaaaaaaaaaaaaaaaaaaatataaatataaataaataaatataaataaataaataaataaatataaatata

SEQ ID NO: 11945 - RNA, 79 nt, synthetic construct
  source 1..79: mol_type = other RNA
aaataaaaaaaaaaaaaaaaaaaaaaataaataaataaataaataaatataaataaatataaatataaatataaatata

SEQ ID NO: 11946 - RNA, 79 nt, synthetic construct
  source 1..79: mol_type = other RNA
aaataaaaaaaaaaaaaaaaaaataaatataaatataaataaataaatataaataaataaataaataaatataaatata

SEQ ID NO: 11947 - RNA, 79 nt, synthetic construct
  source 1..79: mol_type = other RNA
aaataaaaaaaaaaaaaaaaaaataaataaataaataaataaataaatataaataaatataaatataaatataaatata

SEQ ID NO: 11948 - RNA, 79 nt, synthetic construct
  source 1..79: mol_type = other RNA
aaataaatataaataaatataaatataaataaataaataaataaataaatataaaaaaaaaaaaaaataaataaatata

SEQ ID NO: 11949 - RNA, 79 nt, synthetic construct
  source 1..79: mol_type = other RNA
aaataaatataaataaatataaatataaataaataaataaataaatataaataaataaaaaaaaaaataaataaatata

SEQ ID NO: 11950 - RNA, 79 nt, synthetic construct
  source 1..79: mol_type = other RNA
aaataaaaaaaaaaaaaaaaaaaaataaataaataaataaaaaataaataaataaataaataaataaataaataaataa

SEQ ID NO: 11951 - RNA, 79 nt, synthetic construct
  source 1..79: mol_type = other RNA
aaataaaaaaaaaaaaaaaaataaataaataaataaataaaaaataaataaataaataaataaataaataaataaataa

SEQ ID NO: 11952 - RNA, 79 nt, synthetic construct
  source 1..79: mol_type = other RNA
aaataaataaaaaaaaaaaaaaaaataaataaataaataaaaaataaataaataaataaataaataaataaataaataa

SEQ ID NO: 11953 - RNA, 79 nt, synthetic construct
  source 1..79: mol_type = other RNA
aaataaataaataaaaaaaaaaaaataaataaataaataaaaaataaataaataaataaataaataaataaataaataa

SEQ ID NO: 11954 - RNA, 79 nt, synthetic construct
  source 1..79: mol_type = other RNA
aaataaataaaaaaaaaaaaataaataaataaataaataaaaaataaataaataaataaataaataaataaataaataa

SEQ ID NO: 11955 - RNA, 79 nt, synthetic construct
  source 1..79: mol_type = other RNA
aaataaataaataaaaaaaaataaataaataaataaataaaaaataaataaataaataaataaataaataaataaataa

SEQ ID NO: 11956 - RNA, 79 nt, synthetic construct
  source 1..79: mol_type = other RNA
aaataaaaaaaaaaaaaaaaaaaaaaatatataaataaataaataaatataaataaataaataaataaatataaatata

SEQ ID NO: 11957 - RNA, 79 nt, synthetic construct
  source 1..79: mol_type = other RNA
aaataaaaaaaaaaaaaaaaaaaaaaataaataaataaataaataaatataaataaataaatatataaatataaatata

SEQ ID NO: 11958 - RNA, 79 nt, synthetic construct
  source 1..79: mol_type = other RNA
aaataaaaaaaaaaaaaaaaaaaaaaataaatatataaataaataaatataaataaataaataaataaatataaatata

SEQ ID NO: 11959 - RNA, 79 nt, synthetic construct
  source 1..79: mol_type = other RNA
aaataaaaaaaaaaaaaaaaaaataaataaatatataaataaataaatataaataaataaataaataaatataaatata

SEQ ID NO: 11960 - RNA, 79 nt, synthetic construct
  source 1..79: mol_type = other RNA
aaataaaaaaaaaaaaaaaaaaataaataaataaataaataaataaatataaataaataaatatataaatataaatata

SEQ ID NO: 11961 - RNA, 79 nt, synthetic construct
  source 1..79: mol_type = other RNA
aaataaaaaaaaaaaaaaaaaaataaataaataaataaataaataaatataaatatataaataaataaatataaatata

SEQ ID NO: 11962 - RNA, 79 nt, synthetic construct
  source 1..79: mol_type = other RNA
aaataaaaaaaaaaaaaaaaaaataaataaataaataaataaataaatataaataaatatataaataaatataaatata

SEQ ID NO: 11963 - RNA, 79 nt, synthetic construct
  source 1..79: mol_type = other RNA
aaataaaaaaaaaaaaaaaaaaataaatatataaataaataaataaatataaataaataaataaataaatataaatata

SEQ ID NO: 11964 - RNA, 79 nt, synthetic construct
  source 1..79: mol_type = other RNA
aaataaaaaaaaaaaaaaaaaaataaatataaatataaataaataaatataaataaataaataaataaataaatatata

SEQ ID NO: 11965 - RNA, 79 nt, synthetic construct
  source 1..79: mol_type = other RNA
aaataaaaaaaaaaaaaaaaaaaaataaataaataaataaaaaataaataaataaataaataaataaataaataaatat

SEQ ID NO: 11966 - RNA, 79 nt, synthetic construct
  source 1..79: mol_type = other RNA
aaataaataaaaaaaaaaaaaaaaataaataaataaataaaaaataaataaataaataaataaataaataaataaatat

SEQ ID NO: 11967 - RNA, 79 nt, synthetic construct
  source 1..79: mol_type = other RNA
aaataaaaaaaaaaaaaaaaataaataaataaataaataaaaaataaataaataaataaataaataaataaataaatat

SEQ ID NO: 11968 - RNA, 79 nt, synthetic construct
  source 1..79: mol_type = other RNA
aaataaataaataaaaaaaaaaaaataaataaataaataaaaaataaataaataaataaataaataaataaataaatat

SEQ ID NO: 11969 - RNA, 79 nt, synthetic construct
  source 1..79: mol_type = other RNA
aaataaataaaaaaaaaaaaataaataaataaataaataaaaaataaataaataaataaataaataaataaataaatat

SEQ ID NO: 11970 - RNA, 79 nt, synthetic construct
  source 1..79: mol_type = other RNA
aaataaataaataaaaaaaaataaataaataaataaataaaaaataaataaataaataaataaataaataaataaatat

SEQ ID NO: 11971 - RNA, 79 nt, synthetic construct
  source 1..79: mol_type = other RNA
aaataaaaaaaaaaaaaaaaaaaaaaatatataaataaataaataaatataaataaataaataaataaataaatatata

SEQ ID NO: 11972 - RNA, 79 nt, synthetic construct
  source 1..79: mol_type = other RNA
aaataaaaaaaaaaaaaaaaaaaaaaataaataaataaataaatatatataaataaataaataaataaatataaatata

SEQ ID NO: 11973 - RNA, 79 nt, synthetic construct
  source 1..79: mol_type = other RNA
aaataaaaaaaaaaaaaaaaaaataaataaatatataaataaataaatataaataaataaataaataaataaatatata

SEQ ID NO: 11974 - RNA, 79 nt, synthetic construct
  source 1..79: mol_type = other RNA
aaaataaatataaataaataaaaaaaaaaaaaaaaaaaaaaaaaaaaaataaataaataaataaataaataaataaata

SEQ ID NO: 11975 - RNA, 79 nt, synthetic construct
  source 1..79: mol_type = other RNA
aaaataaatataaataaataaaaaaaaaaaaaaaaaaaaaaaaaataaataaataaataaataaataaataaataaata

SEQ ID NO: 11976 - RNA, 79 nt, synthetic construct
  source 1..79: mol_type = other RNA
aaaataaatataaataaataaaaaaaaaaaaaaaaaaaaaataaataaataaataaataaataaataaataaataaata

SEQ ID NO: 11977 - RNA, 79 nt, synthetic construct
  source 1..79: mol_type = other RNA
aaataaatataaataaaaataaatataaataaataaataaataaataaaaaaaaaaaaaaaaaaaaaaaaaaaaatata

SEQ ID NO: 11978 - RNA, 79 nt, synthetic construct
  source 1..79: mol_type = other RNA
aaataaaaaaaaaaaaaaaaaaaaaaataaataaataaataaataaatataaataaataaataaataaatatatatata

SEQ ID NO: 11979 - RNA, 79 nt, synthetic construct
  source 1..79: mol_type = other RNA
aaaaaaaaaaaaaaaaaaaaaaaaaaaaaaaaaaataaataaataaaaaaaaaaaaaaaaaaaatataaatataaataa

SEQ ID NO: 11980 - RNA, 79 nt, synthetic construct
  source 1..79: mol_type = other RNA
aaataaatataaataaatataaaaataaataaataaataaataaataaataaaaaaaaaaaaaaaaaaaaaaaaatata

SEQ ID NO: 11981 - RNA, 79 nt, synthetic construct
  source 1..79: mol_type = other RNA
aaataaaaaaaaaaaaaaaaaaataaataaataaataaataaataaatataaataaataaataaataaatatatatata

SEQ ID NO: 11982 - RNA, 79 nt, synthetic construct
  source 1..79: mol_type = other RNA
aaaaaaaaaaaaaaaaaaaaaaaaaaaaaaaaaaataaataaataaaaaaaaaaaaaaaataaatataaatataaataa

SEQ ID NO: 11983 - RNA, 79 nt, synthetic construct
  source 1..79: mol_type = other RNA
aaaaaaaaaaaaaaaaaaaaaaaaaaaaaaaaaaataaataaataaataaaaaaaaaaaaaaaatataaatataaataa

SEQ ID NO: 11984 - RNA, 79 nt, synthetic construct
  source 1..79: mol_type = other RNA
aaataaaaaaaaaaaaaaaaaaaaataaataaataaataaataataaataaataaataaataaataaataaataaataa

SEQ ID NO: 11985 - RNA, 79 nt, synthetic construct
  source 1..79: mol_type = other RNA
aaataaaaaaaaaaaaaaaaaaaataaaaaataaataaataaataaatataaataaataaataaataaatataaatata

SEQ ID NO: 11986 - RNA, 79 nt, synthetic construct
  source 1..79: mol_type = other RNA
aaataaaaaaaaaaaaaaaaaaataaaaaaataaataaataaataaatataaataaataaataaataaatataaatata

SEQ ID NO: 11987 - RNA, 79 nt, synthetic construct
  source 1..79: mol_type = other RNA
aaataaaaaaaaaaaaaaaaaaataaataaataaataaataaataaatataaataaataaaaaaataaatataaatata

SEQ ID NO: 11988 - RNA, 79 nt, synthetic construct
  source 1..79: mol_type = other RNA
aaatataaataaataaataaataaataaatataaataaataaaaaaaataaaaaaaaaaaaaaaaaataaataaatata

SEQ ID NO: 11989 - RNA, 79 nt, synthetic construct
  source 1..79: mol_type = other RNA
aaaaaaaaaaaaaaaaaaaaaaaaaaaaaaaaaaataaataaataaataaataaaaaaaaaaaatataaatataaataa

SEQ ID NO: 11990 - RNA, 79 nt, synthetic construct
  source 1..79: mol_type = other RNA
aaaaaaaaaaaaaaaaaaaaaaaaaaaaaaaaaaataaataaataaataaaaaaaaaaaataaatataaatataaataa

SEQ ID NO: 11991 - RNA, 79 nt, synthetic construct
  source 1..79: mol_type = other RNA
aaataaaaaaaaaaaaaaaaataaataaataaataaataaataataaataaataaataaataaataaataaataaataa

SEQ ID NO: 11992 - RNA, 79 nt, synthetic construct
  source 1..79: mol_type = other RNA
aaataaataaaaaaaaaaaaaaaaataaataaataaataaataataaataaataaataaataaataaataaataaataa

SEQ ID NO: 11993 - RNA, 79 nt, synthetic construct
  source 1..79: mol_type = other RNA
aaataaaaaaaaaaaaaaaataaataaaaaataaataaataaataaatataaataaataaataaataaatataaatata

SEQ ID NO: 11994 - RNA, 79 nt, synthetic construct
  source 1..79: mol_type = other RNA
aaataaaaaaaaaaaataaaaaaaaaataaataaataaataaataaatataaataaataaataaataaatataaatata

SEQ ID NO: 11995 - RNA, 79 nt, synthetic construct
  source 1..79: mol_type = other RNA
aaataaaaaaaaaaaataaataaaaaaaaaataaataaataaataaatataaataaataaataaataaatataaatata

SEQ ID NO: 11996 - RNA, 79 nt, synthetic construct
  source 1..79: mol_type = other RNA
aaataaaaaaaaaaaaaaaaataaaaataaataaataaataaataaatataaataaataaataaataaatataaatata

SEQ ID NO: 11997 - RNA, 79 nt, synthetic construct
  source 1..79: mol_type = other RNA
aaataaaaaaaataaaaaaaaaaaaaataaataaataaataaataaatataaataaataaataaataaatataaatata

SEQ ID NO: 11998 - RNA, 79 nt, synthetic construct
  source 1..79: mol_type = other RNA
aaataaaataaaaaaaaaaaaaaaaaataaataaataaataaataaatataaataaataaataaataaatataaatata

SEQ ID NO: 11999 - RNA, 79 nt, synthetic construct
  source 1..79: mol_type = other RNA
aaatataaataaataaataaataaataaatataaataaataaaaaaaataaataaaaaaaaaaaaaataaataaatata

SEQ ID NO: 12000 - RNA, 79 nt, synthetic construct
  source 1..79: mol_type = other RNA
aaatataaataaataaataaataaataaatataaataaataaaataaataaaaaaaaaaaaaaaaaataaataaatata

SEQ ID NO: 12001 - RNA, 79 nt, synthetic construct
  source 1..79: mol_type = other RNA
aaatataaataaataaataaataaataaatataaataaaataaataaataaaaaaaaaaaaaaaaaataaataaatata

SEQ ID NO: 12002 - RNA, 79 nt, synthetic construct
  source 1..79: mol_type = other RNA
aaaaaaaaaaaaaaaaaaaaaaaaaaaaaaaaaaataaataaataaataaataaaaaaaataaatataaatataaataa

SEQ ID NO: 12003 - RNA, 79 nt, synthetic construct
  source 1..79: mol_type = other RNA
aaataaataaataaaaaaaaaaaaataaataaataaataaataataaataaataaataaataaataaataaataaataa

SEQ ID NO: 12004 - RNA, 79 nt, synthetic construct
  source 1..79: mol_type = other RNA
aaataaaaaaaaaaaataaataaataaaaaataaataaataaataaatataaataaataaataaataaatataaatata

SEQ ID NO: 12005 - RNA, 79 nt, synthetic construct
  source 1..79: mol_type = other RNA
aaataaaaaaaaaaaataaaaaataaataaataaataaataaataaatataaataaataaataaataaatataaatata

SEQ ID NO: 12006 - RNA, 79 nt, synthetic construct
  source 1..79: mol_type = other RNA
aaataaaaaaaaaaaataaataaaaaataaataaataaataaataaatataaataaataaataaataaatataaatata

SEQ ID NO: 12007 - RNA, 79 nt, synthetic construct
  source 1..79: mol_type = other RNA
aaatataaataaataaataaataaataaatataaataaataaaataaataaataaaaaaaaaaaaaataaataaatata

SEQ ID NO: 12008 - RNA, 79 nt, synthetic construct
  source 1..79: mol_type = other RNA
aaatataaataaataaataaataaataaatataaataaataaaaaaaataaataaataaaaaaaaaataaataaatata

SEQ ID NO: 12009 - RNA, 79 nt, synthetic construct
  source 1..79: mol_type = other RNA
aaataaataaataaaaaaaaataaataaataaataaataaataataaataaataaataaataaataaataaataaataa

SEQ ID NO: 12010 - RNA, 79 nt, synthetic construct
  source 1..79: mol_type = other RNA
aaaaaaaaaaaaaaaaaataaaaaaaaaaaaatataaataaataaataaataaataaataaataaatataaataaataa

SEQ ID NO: 12011 - RNA, 79 nt, synthetic construct
  source 1..79: mol_type = other RNA
aaataaatataaataaatataaatataaataaataaataaataaataaaaaaaaaaaaaaaaaaaaaaaaaaaaaaata

SEQ ID NO: 12012 - RNA, 79 nt, synthetic construct
  source 1..79: mol_type = other RNA
aaataaatataaataaatataaatataaataaataaataaataaataaataaaaaaaaaaaaaaaaaaaaaaaaaaata

SEQ ID NO: 12013 - RNA, 79 nt, synthetic construct
  source 1..79: mol_type = other RNA
aaataaatataaataaatataaatataaataaataaatataaatataaataaataaaaaaaaaaaaaaaaataaatata

SEQ ID NO: 12014 - RNA, 79 nt, synthetic construct
  source 1..79: mol_type = other RNA
aaaaaaaaaaaaaaaaaaaaaaaaaaaaaaaaaaataaataaataaaaaaaaaaaaaaaaaaaatataaatataaatat

SEQ ID NO: 12015 - RNA, 79 nt, synthetic construct
  source 1..79: mol_type = other RNA
aaataaatataaataaatataaatataaataaataaatataaatataaataaataaaaaaaaaaaaataaataaatata

SEQ ID NO: 12016 - RNA, 79 nt, synthetic construct
  source 1..79: mol_type = other RNA
aaataaaaaaaaaaaaaaaaaaaaataaataaataaataaataataaataaataaataaataaataaataaataaatat

SEQ ID NO: 12017 - RNA, 79 nt, synthetic construct
  source 1..79: mol_type = other RNA
aaataaataaaaaaaaaaaaaaaaataaataaataaataaataataaataaataaataaataaataaataaataaatat

SEQ ID NO: 12018 - RNA, 79 nt, synthetic construct
  source 1..79: mol_type = other RNA
aaataaaaaaaaaaaataaaaaataaataaataaataaataaataaatataaataaataaataaataaataaatatata

SEQ ID NO: 12019 - RNA, 79 nt, synthetic construct
  source 1..79: mol_type = other RNA
aaataaataaataaaaaaaaaaaaataaataaataaataaataataaataaataaataaataaataaataaataaatat

SEQ ID NO: 12020 - RNA, 79 nt, synthetic construct
  source 1..79: mol_type = other RNA
aaataaaaaaaaaaaaaaaaaaaaataaataaataaataaaatataaataaataaataaataaataaataaataaataa

SEQ ID NO: 12021 - RNA, 79 nt, synthetic construct
  source 1..79: mol_type = other RNA
aaataaataaataaaaaaaaataaataaataaataaataaataataaataaataaataaataaataaataaataaatat

SEQ ID NO: 12022 - RNA, 79 nt, synthetic construct
  source 1..79: mol_type = other RNA
aaataaaaaaaaaaaaaaaaataaataaataaataaataaaatataaataaataaataaataaataaataaataaataa

SEQ ID NO: 12023 - RNA, 79 nt, synthetic construct
  source 1..79: mol_type = other RNA
aaataaataaaaaaaaaaaaaaaaataaataaataaataaaatataaataaataaataaataaataaataaataaataa

SEQ ID NO: 12024 - RNA, 79 nt, synthetic construct
  source 1..79: mol_type = other RNA
aaatataaataaaaaaaaaaataaataaataaataaataaaaaataaataaataaataaataaataaataaataaataa

SEQ ID NO: 12025 - RNA, 79 nt, synthetic construct
  source 1..79: mol_type = other RNA
aaataaataaataaaaaaaaaaaaataaataaataaataaaatataaataaataaataaataaataaataaataaataa

SEQ ID NO: 12026 - RNA, 79 nt, synthetic construct
  source 1..79: mol_type = other RNA
aaataaataaaaaaaaaaaaataaataaataaataaataaaatataaataaataaataaataaataaataaataaataa

SEQ ID NO: 12027 - RNA, 80 nt, synthetic construct
  source 1..80: mol_type = other RNA
aaaaaaaaaaaaaaaaaaaaaaaaaaaaaaaaaaaaaaaaaaaaataaataaataaataaaaaaaaaaaaaaaaaatata

SEQ ID NO: 12028 - RNA, 80 nt, synthetic construct
  source 1..80: mol_type = other RNA
aaataaataaataaaaaaaaaaaaaaaaaaaaaaaaaaaaaaaaaaaaaaaaaaaatataaataaataaataaatatata

SEQ ID NO: 12029 - RNA, 80 nt, synthetic construct
  source 1..80: mol_type = other RNA
aaaaaaaaaaaaaaaaaaaaaaaaaaaaaaaaaaaaaaaaaaaaataaataaataaatataaaaaaaaaaaaaaaatata

SEQ ID NO: 12030 - RNA, 80 nt, synthetic construct
  source 1..80: mol_type = other RNA
aaaaaaaaaaaaaaaaaaaaaaaaaaaaaaaaaaaaaaaaaaaaataaataaataaatataaataaaaaaaaaaaatata

SEQ ID NO: 12031 - RNA, 80 nt, synthetic construct
  source 1..80: mol_type = other RNA
aaaaaaaaaaaaaaaaaaaaaaaaaaaaaaaaaaaaaaaaataaataaataaataaatataaataaaaaaaaaaaatata

SEQ ID NO: 12032 - RNA, 80 nt, synthetic construct
  source 1..80: mol_type = other RNA
aaaaaaaaaaaaaaaaaaaaaaaaaaaaaaaaaaaaataaataaataaataaataaatataaataaaaaaaaaaaatata

SEQ ID NO: 12033 - RNA, 80 nt, synthetic construct
  source 1..80: mol_type = other RNA
aaaaaaaaaaaaaaaaaaaaaaaaaaaaaaaaataaataaataaataaataaataaatataaataaaaaaaaaaaatata

SEQ ID NO: 12034 - RNA, 80 nt, synthetic construct
  source 1..80: mol_type = other RNA
aaaaaaaaaaaaaaaaaaaaaaaaaaaaataaataaataaataaataaataaataaatataaataaaaaaaaaaaatata

SEQ ID NO: 12035 - RNA, 80 nt, synthetic construct
  source 1..80: mol_type = other RNA
aaaaaaaaaaaaaaaaaaaaaaaaataaataaataaataaataaataaataaataaatataaataaaaaaaaaaaatata

SEQ ID NO: 12036 - RNA, 80 nt, synthetic construct
  source 1..80: mol_type = other RNA
aaaaaaaaaaaaaaaaaaaaataaaaaaaaaaaaaaaaaaaaaaaaaaaaaaaaaaaaaaaaaaaaaaataaataaataa

SEQ ID NO: 12037 - RNA, 80 nt, synthetic construct
  source 1..80: mol_type = other RNA
aaaaaaaaaaaaaaaaataaataaaaaaaaaaaaaaaaaaaaaaaaaaaaaaaaaaaaaaaaaaaaaaataaataaataa

SEQ ID NO: 12038 - RNA, 80 nt, synthetic construct
  source 1..80: mol_type = other RNA
aaaaaaaaaaaaaaaaataaataaataaaaaaaaaaaaaaaaaaaaaaaaaaaaaaaaaaaaaaaaaaataaataaataa

SEQ ID NO: 12039 - RNA, 80 nt, synthetic construct
  source 1..80: mol_type = other RNA
aaaaaaaaaaaaaaaaaaaaataaaaaaaaaaaaaaaaaaaaaaaaaaaaaaaaaaaaaaaaaaaaaataaataaataaa

SEQ ID NO: 12040 - RNA, 80 nt, synthetic construct
  source 1..80: mol_type = other RNA
aaaaaaaaaaaaaaaaaaaaataaaaaaaaaaaaaaaaaaaaaaaaaaaaaaaaaaaaaaaaaaaaaaataaataaatat

SEQ ID NO: 12041 - RNA, 80 nt, synthetic construct
  source 1..80: mol_type = other RNA
aaataaaaaaaaaaaaaaaaaaaaaaaaaaaaaaaaaaaaaaaaataaataaataaatataaataaaaaaaaaaaatata

SEQ ID NO: 12042 - RNA, 80 nt, synthetic construct
  source 1..80: mol_type = other RNA
aaataaatataaataaataaataaataaataaaaaaaaaaaaaaaaataaaaaaaaaaaaaaaaaaaaaaaaaaaatata

SEQ ID NO: 12043 - RNA, 80 nt, synthetic construct
  source 1..80: mol_type = other RNA
aaaaaaaaaaaaaaaaaaaaataaaaaaaaaaaaaaaaaaaaaaaaaaaaaaaaaaaaaaaaaaaaatataaataaataa

SEQ ID NO: 12044 - RNA, 80 nt, synthetic construct
  source 1..80: mol_type = other RNA
aaaaaaaaaaaaaaaaaaatataaaaaaaaaaaaaaaaaaaaaaaaaaaaaaaaaaaaaaaaaaaaaaataaataaataa

SEQ ID NO: 12045 - RNA, 80 nt, synthetic construct
  source 1..80: mol_type = other RNA
aaaaaaaaaataaataaataaaaaaaaaaaaaaaaaaaaaaaaaaaaaaaaaaaaaaaaaaaaaaaaaaaatataaataa

SEQ ID NO: 12046 - RNA, 80 nt, synthetic construct
  source 1..80: mol_type = other RNA
aaaaaaaaaaaaaaaaaaataaataaataaataaatataaataaataaataaataaataaatataaataaataaatatat

SEQ ID NO: 12047 - RNA, 80 nt, synthetic construct
  source 1..80: mol_type = other RNA
aaaaaataaataaataaataaaaaaaaaaaaaaaaaaaaaaaaaaaaaaaaaaaaaaaaaaaaaaaaaaaatataaataa

SEQ ID NO: 12048 - RNA, 80 nt, synthetic construct
  source 1..80: mol_type = other RNA
aaaaaaaaaaaaaaaaaaaaaaaaaaaaaaaaaaaaaaaaataaataaataaataaatataaataaaaaaaaaaaaataa

SEQ ID NO: 12049 - RNA, 80 nt, synthetic construct
  source 1..80: mol_type = other RNA
aaaaaaaaaaaaaaaaaaaaaaaaaaaaaaaaaaaaataaataaataaataaataaatataaataaaaaaaaaaaaataa

SEQ ID NO: 12050 - RNA, 80 nt, synthetic construct
  source 1..80: mol_type = other RNA
aaaaaaaaaaaaaaaaaaaaaaaaaaaaaaaaataaataaataaataaataaataaatataaataaaaaaaaaaaaataa

SEQ ID NO: 12051 - RNA, 80 nt, synthetic construct
  source 1..80: mol_type = other RNA
aaataaaaaaaaaaaaaaaaataaaaaaaaaaaaaaaaaaaaaaaaaaaaaaaaaaaaaaaaaaaaaaataaataaataa

SEQ ID NO: 12052 - RNA, 80 nt, synthetic construct
  source 1..80: mol_type = other RNA
aaaaaaaaaaaaaaaaaaaaaaaaaaaaaaaaaaaaaaaaataaataaataaataaatataaataaaaaaaaaaaataaa

SEQ ID NO: 12053 - RNA, 80 nt, synthetic construct
  source 1..80: mol_type = other RNA
aaaaaaaaaaaaaaaaaaaaaaaaaaaaataaataaataaataaataaataaataaatataaataaaaaaaaaaaaataa

SEQ ID NO: 12054 - RNA, 80 nt, synthetic construct
  source 1..80: mol_type = other RNA
aaaaaaaaaaaaaaaaaaaaaaaaaaaaaaaaaaaaataaataaataaataaataaatataaataaaaaaaaaaaataaa

SEQ ID NO: 12055 - RNA, 80 nt, synthetic construct
  source 1..80: mol_type = other RNA
aaaaaaaaaaaaaaaaaaaaaaaaataaataaataaataaataaataaataaataaatataaataaaaaaaaaaaaataa

SEQ ID NO: 12056 - RNA, 80 nt, synthetic construct
  source 1..80: mol_type = other RNA
aaaaaaaaaaaaaaaaaaaaaaaaaaaaataaataaataaataaataaataaataaatataaataaaaaaaaaaaataaa

SEQ ID NO: 12057 - RNA, 80 nt, synthetic construct
  source 1..80: mol_type = other RNA
aaaaaaaaaaaaaaaaaaaaaaaaataaataaataaataaataaataaataaataaatataaataaaaaaaaaaaataaa

SEQ ID NO: 12058 - RNA, 80 nt, synthetic construct
  source 1..80: mol_type = other RNA
aaaaaaaaaaaaaaaaaaaaataaaaaaaaaaaaaaaaaaaaaaaaaaaaaaaaaaaaaaaaaaaaaataaataaataat

SEQ ID NO: 12059 - RNA, 80 nt, synthetic construct
  source 1..80: mol_type = other RNA
aaaaaaaaaaaaaaaaaaaaaaaaaaaaatataaataaataaataaataaatataaatataaataaatataaataaataa

SEQ ID NO: 12060 - RNA, 80 nt, synthetic construct
  source 1..80: mol_type = other RNA
aaaaaaaaaaaaaaaaaaaaaaaaataaatataaataaataaataaataaatataaatataaataaatataaataaataa

SEQ ID NO: 12061 - RNA, 80 nt, synthetic construct
  source 1..80: mol_type = other RNA
aaataaataaataaataaaaaaaaaaaaaaaaaaaaaaaaaaaataaaaaaaaaaaaaaaaaaaaaaaaaaaaaaaatat

SEQ ID NO: 12062 - RNA, 80 nt, synthetic construct
  source 1..80: mol_type = other RNA
aaataaataaataaataaaaaaaaaaaaaaaaaaaaaaaaaaaataaataaaaaaaaaaaaaaaaaaaaaaaaaaaatat

SEQ ID NO: 12063 - RNA, 80 nt, synthetic construct
  source 1..80: mol_type = other RNA
aaaaaaaaaaaaaaaaaataaataaataaataaataaataaaaaaaaaaaaaaaaaaaaataaaaaaaaaaaaaaatata

SEQ ID NO: 12064 - RNA, 80 nt, synthetic construct
  source 1..80: mol_type = other RNA
aaataaataaataaaaaaaaaaaaaaaaaaaaaaaaaaaaaaaaaaaaaaaaaaaatataaataaataaatatatatata

SEQ ID NO: 12065 - RNA, 80 nt, synthetic construct
  source 1..80: mol_type = other RNA
aaaaaaaaaaaaaaaaaaaaaaaaataaataaataaataaataaataaataaataaatataaataaaaaaaaaaaaaata

SEQ ID NO: 12066 - RNA, 80 nt, synthetic construct
  source 1..80: mol_type = other RNA
aaataaataaataaaaaaaaaaaaaaaaaaaataaaaaaaaaaaaaaaaaaaaaaaaaaaaaaaaataaataaataaata

SEQ ID NO: 12067 - RNA, 80 nt, synthetic construct
  source 1..80: mol_type = other RNA
aaataaataaataaaaaaaaaaaaaaaaaaaataaataaaaaaaaaaaaaaaaaaaaaaaaaaaaataaataaataaata

SEQ ID NO: 12068 - RNA, 80 nt, synthetic construct
  source 1..80: mol_type = other RNA
aaaaaaaaaaaaaaaaaaaaaaaaaaaaaaaaaaaaaaaaataaatatataaataaatataaataaaaaaaaaaaatata

SEQ ID NO: 12069 - RNA, 80 nt, synthetic construct
  source 1..80: mol_type = other RNA
aaaaaaaaaaaaaaaaaaaaaaaaaaaaaaaaaaaaataaataaatatataaataaatataaataaaaaaaaaaaatata

SEQ ID NO: 12070 - RNA, 80 nt, synthetic construct
  source 1..80: mol_type = other RNA
aaaaaaaaaaaaaaaaaaaaaaaaaaaaaaaaataaataaataaatatataaataaatataaataaaaaaaaaaaatata

SEQ ID NO: 12071 - RNA, 80 nt, synthetic construct
  source 1..80: mol_type = other RNA
aaaaaaaaaaaaaaaaaaaaaaaaaaaaataaataaataaataaatatataaataaatataaataaaaaaaaaaaatata

SEQ ID NO: 12072 - RNA, 80 nt, synthetic construct
  source 1..80: mol_type = other RNA
aaaaaaaaaaaaaaaaaaaaaaaaataaataaataaataaataaatatataaataaatataaataaaaaaaaaaaatata

SEQ ID NO: 12073 - RNA, 80 nt, synthetic construct
  source 1..80: mol_type = other RNA
aaataaataaataaaaaaaaaaaaaaaataaaaaaaaaaaaaaaaaaaaaaaaaaatataaataaataaataaatatata

SEQ ID NO: 12074 - RNA, 80 nt, synthetic construct
  source 1..80: mol_type = other RNA
aaataaataaataaaaaaaaaaaaaaaaaaaaaaaaaataaaaaaaaaaaaaaaaatataaataaataaataaatatata

SEQ ID NO: 12075 - RNA, 80 nt, synthetic construct
  source 1..80: mol_type = other RNA
aaataaataaataaataaataaaaaaaaaaaaaaaaaaaaaaaaaaaaaaaaaaaaataaatataaaaaaaaaaaaataa

SEQ ID NO: 12076 - RNA, 80 nt, synthetic construct
  source 1..80: mol_type = other RNA
aaataaataaataaaaaaaaaaaaaaaataaataaaaaaaaaaaaaaaaaaaaaaatataaataaataaataaatatata

SEQ ID NO: 12077 - RNA, 80 nt, synthetic construct
  source 1..80: mol_type = other RNA
aaataaataaataaataaaaaaaaaaaataaaaaaaaaaaaaaaaaaaaaaaaaaatataaataaataaataaatatata

SEQ ID NO: 12078 - RNA, 80 nt, synthetic construct
  source 1..80: mol_type = other RNA
aaaaaaaaaaaaaaaaaaaaaaaaaaaaaaaaaaaaaaaaataaataaataaatatatataaataaaaaaaaaaaatata

SEQ ID NO: 12079 - RNA, 80 nt, synthetic construct
  source 1..80: mol_type = other RNA
aaataaataaataaataaataaataaaaaaaaaaaaaaaaaaaaaaaaaaaaaaaaataaatataaaaaaaaaaaaataa

SEQ ID NO: 12080 - RNA, 80 nt, synthetic construct
  source 1..80: mol_type = other RNA
aaataaataaataaataaataaaaaaaaaaaaaaaaaaaaaaaaaaaaaaaaaaaaataaatataaaaaaaaataaataa

SEQ ID NO: 12081 - RNA, 80 nt, synthetic construct
  source 1..80: mol_type = other RNA
aaataaataaataaataaataaaaaaaaaaaaaaaaaaaaaaaaaaaaaaaaataaataaatataaaaaaaaaaaaataa

SEQ ID NO: 12082 - RNA, 80 nt, synthetic construct
  source 1..80: mol_type = other RNA
aaaaaaaaaataaataaataaaaaaaaaaaaaaaaaaaaaaaaaaaaaaaaaaaaaaaaaaaaaaaaaatatataaataa

SEQ ID NO: 12083 - RNA, 80 nt, synthetic construct
  source 1..80: mol_type = other RNA
aaataaataaataaaaaaaaaaaaaaaataaataaataaaaaaaaaaaaaaaaaaatataaataaataaataaatatata

SEQ ID NO: 12084 - RNA, 80 nt, synthetic construct
  source 1..80: mol_type = other RNA
aaataaataaataaataaaaaaaaaaaataaataaaaaaaaaaaaaaaaaaaaaaatataaataaataaataaatatata

SEQ ID NO: 12085 - RNA, 80 nt, synthetic construct
  source 1..80: mol_type = other RNA
aaaaaaaaaaaaaaaaaaataaataaataaataaatataaataaataaataaataaataaatataaataaataaatatac

SEQ ID NO: 12086 - RNA, 80 nt, synthetic construct
  source 1..80: mol_type = other RNA
aaataaataaataaataaataaataaaaaaaaaaaaaaaaaaaaaaaaaaaaaaaaataaatataaaaaaaaataaataa

SEQ ID NO: 12087 - RNA, 80 nt, synthetic construct
  source 1..80: mol_type = other RNA
aaataaataaataaataaaaaaaaaaaataaataaataaaaaaaaaaaaaaaaaaatataaataaataaataaatatata

SEQ ID NO: 12088 - RNA, 80 nt, synthetic construct
  source 1..80: mol_type = other RNA
aaaaaaaaaaaaaaaaaaaaaaatataaatataaataaataaataaataaatataaatataaataaatataaataaataa

SEQ ID NO: 12089 - RNA, 80 nt, synthetic construct
  source 1..80: mol_type = other RNA
aaaaaaaaaaaaaaaaaaataaatataaatataaataaataaataaataaatataaatataaataaatataaataaataa

SEQ ID NO: 12090 - RNA, 80 nt, synthetic construct
  source 1..80: mol_type = other RNA
aaaaaaaaaaaaaaaaaaaaaaaaaaaaaaaaaaaaaaaaaataaataaaaaaaaaaaataaatataaaaaaaaaatata

SEQ ID NO: 12091 - RNA, 80 nt, synthetic construct
  source 1..80: mol_type = other RNA
aaataaataaataaataaataaaaaaaaaaaaaaaaaaaaaaaaaaaaaaaaaaaaataaatataaaaaaaaaaaaatat

SEQ ID NO: 12092 - RNA, 80 nt, synthetic construct
  source 1..80: mol_type = other RNA
aaaaaaaaaaaaaaaaaaaaaaaaaaaaaaaaaaaaaaaaaataaataaataaaaaaaataaatataaaaaaaaaatata

SEQ ID NO: 12093 - RNA, 80 nt, synthetic construct
  source 1..80: mol_type = other RNA
aaaaaaaaaaaaaaaaaaaaaaaaaaaaaaaaaaaaaaaaaaaaaataaataaaaaaaataaatataaaaaataaatata

SEQ ID NO: 12094 - RNA, 80 nt, synthetic construct
  source 1..80: mol_type = other RNA
aaaaaaaaaaaaaaaaaaaaaaaaaaaaaaaaaaaaaataaataaataaaaaaaaaaaataaatataaaaaaaaaatata

SEQ ID NO: 12095 - RNA, 80 nt, synthetic construct
  source 1..80: mol_type = other RNA
aaaaaaataaaaaaaaaaaaaaaaaaaaaaaaaaaaaaaaaaaaataaataaataaatataaaaaaaaaaaaaaaatata

SEQ ID NO: 12096 - RNA, 80 nt, synthetic construct
  source 1..80: mol_type = other RNA
aaaaaaaataaaaaaaaaaaaaaaaaaaaaaaaaaaaaaaaaaaataaataaataaatataaaaaaaaaaaaaaaatata

SEQ ID NO: 12097 - RNA, 80 nt, synthetic construct
  source 1..80: mol_type = other RNA
aaaaaaaaaaaaataaaaaaaaaaaaaaaaaaaaaaaaaaaaaaaaaaaaaaaaaaaaaaataaataaatataaatatat

SEQ ID NO: 12098 - RNA, 80 nt, synthetic construct
  source 1..80: mol_type = other RNA
aaaaaaaaaaaaaaaaaaaaaaaaaaaaaaaaaaaaaaaaaataaataaataaataaaataaatataaaaaaaaaatata

SEQ ID NO: 12099 - RNA, 80 nt, synthetic construct
  source 1..80: mol_type = other RNA
aaaaaaaaaaaaaaaaaaaaaaaaaaaaaaaaaaaaaaaaaataaataaataaaaaaaataaatataaaaaataaatata

SEQ ID NO: 12100 - RNA, 80 nt, synthetic construct
  source 1..80: mol_type = other RNA
aaaaaaaaaaaaaaaaaaaaaaaaaaaaaaaaaaaaaaaaaataaataaataaaaaaaataaatataaataaaaaatata

SEQ ID NO: 12101 - RNA, 80 nt, synthetic construct
  source 1..80: mol_type = other RNA
aaaaaaaaaaaaaaaaaaaaaaaaaaaaaaaaaaaaaaaaaaaaaataaataaataaaataaatataaataaaaaatata

SEQ ID NO: 12102 - RNA, 80 nt, synthetic construct
  source 1..80: mol_type = other RNA
aaaaaaaaaaaaaaaaaaaaaaaataaaaaaaaaaaaaaaaaaaataaataaataaatataaataaaaaaaaaaaatata

SEQ ID NO: 12103 - RNA, 80 nt, synthetic construct
  source 1..80: mol_type = other RNA
aaaaaaaaaaaaaaaaaaaaaaaaaaaaaaaaaaaaaaaaaaaaataaataaataaatataaataaaaaataaaaatata

SEQ ID NO: 12104 - RNA, 80 nt, synthetic construct
  source 1..80: mol_type = other RNA
aaaaaaaaaaaaaaaaaataaataaataaataaataaataaaaaaaaaaaaaaaaaaatataaaaaaaaaaaaaaatata

SEQ ID NO: 12105 - RNA, 80 nt, synthetic construct
  source 1..80: mol_type = other RNA
aaaaaaaaaaaaaaaaaaaaaaaaaaaaaaaaaaaaaaaaaataaataaataaataaaataaatataaataaaaaatata

SEQ ID NO: 12106 - RNA, 80 nt, synthetic construct
  source 1..80: mol_type = other RNA
aaaaaaaaaaaaaaaaaaaaaaaaaaaaaaaaaaaaaaaaaataaataaataaataaaataaatataaaaaataaatata

SEQ ID NO: 12107 - RNA, 80 nt, synthetic construct
  source 1..80: mol_type = other RNA
aaaaaaaaaaaaaaaaaaaaaaaaaaaaataaaaaaaaaaataaataaataaataaatataaataaaaaaaaaaaatata

SEQ ID NO: 12108 - RNA, 80 nt, synthetic construct
  source 1..80: mol_type = other RNA
aaaaaaaaaaaaaaaaaaaaaaaaataaaaaaaaaaaaaaataaataaataaataaatataaataaaaaaaaaaaatata

SEQ ID NO: 12109 - RNA, 80 nt, synthetic construct
  source 1..80: mol_type = other RNA
aaaaaaaaaaaaaaaaaaaaaaaaaaaaaaaaataaaaaaataaataaataaataaatataaataaaaaaaaaaaatata

SEQ ID NO: 12110 - RNA, 80 nt, synthetic construct
  source 1..80: mol_type = other RNA
aaaataaaaaaaaaaaaaaaaaaaaaaaaaaaaaaaaaaaataaataaataaataaatataaataaaaaaaaaaaatata

SEQ ID NO: 12111 - RNA, 80 nt, synthetic construct
  source 1..80: mol_type = other RNA
aaaaaaaaaaaaaaaaaaaaaaaaaaaaaaaaaaaaaaaaataaataaataaataaatataaataaaataaaaaaatata

SEQ ID NO: 12112 - RNA, 80 nt, synthetic construct
  source 1..80: mol_type = other RNA
aaaaaaaaaaaaaaaaaaaaaataaaaaaaaaaaaaaaaaataaataaataaataaatataaataaaaaaaaaaaatata

SEQ ID NO: 12113 - RNA, 80 nt, synthetic construct
  source 1..80: mol_type = other RNA
aaaaaaaaaaaaaaaaaaaaaaaataaaaaaaaaaaaaaaataaataaataaataaatataaataaaaaaaaaaaatata

SEQ ID NO: 12114 - RNA, 80 nt, synthetic construct
  source 1..80: mol_type = other RNA
aaaaaaaaaaaaaaaaaaaaaaaaaaaaaaaaaaataaaaataaataaataaataaatataaataaaaaaaaaaaatata

SEQ ID NO: 12115 - RNA, 80 nt, synthetic construct
  source 1..80: mol_type = other RNA
aaaaaaaaaaaaataaaaaaaaaaaaaaaaaaaaaaaaaaataaataaataaataaatataaataaaaaaaaaaaatata

SEQ ID NO: 12116 - RNA, 80 nt, synthetic construct
  source 1..80: mol_type = other RNA
aaaaaaaaaaaaaaaaaaataaaaaaaaaaaaaaaaaaaaataaataaataaataaatataaataaaaaaaaaaaatata

SEQ ID NO: 12117 - RNA, 80 nt, synthetic construct
  source 1..80: mol_type = other RNA
aaaaaaaaaaaaaataaataaataaataaataaataaataaaaaaaaaaaaaaaaaaatataaaaaaaaaaaaaaatata

SEQ ID NO: 12118 - RNA, 80 nt, synthetic construct
  source 1..80: mol_type = other RNA
aaaaaaaaaaaaaaaaaataaataaataaataaataaataaaaaaaaaaaaaaaaaaatataaaaaaaaaaataaatata

SEQ ID NO: 12119 - RNA, 80 nt, synthetic construct
  source 1..80: mol_type = other RNA
aaaaaaaaaaaaaaaaaataaataaataaataaataaataaataaaaaaaaaaaaaaatataaaaaaaaaaaaaaatata

SEQ ID NO: 12120 - RNA, 80 nt, synthetic construct
  source 1..80: mol_type = other RNA
aaaaaaaaaaaaaaaaaaaaaaaaaaaaataaaaaaataaataaataaataaataaatataaataaaaaaaaaaaatata

SEQ ID NO: 12121 - RNA, 80 nt, synthetic construct
  source 1..80: mol_type = other RNA
aaaaaaaaaaaaaaaaaaaaaaaaataaataaataaataaataaataaaaaaaaaaatataaataaaaaaaaaaaatata

SEQ ID NO: 12122 - RNA, 80 nt, synthetic construct
  source 1..80: mol_type = other RNA
aaaaaaaaaaaaaaaaaaaaaaaaataaataaaaaaaaaaataaataaataaataaatataaataaaaaaaaaaaatata

SEQ ID NO: 12123 - RNA, 80 nt, synthetic construct
  source 1..80: mol_type = other RNA
aaaaaaaaaaaaaaaaaaaaaaaaataaaaaaaaaaataaataaataaataaataaatataaataaaaaaaaaaaatata

SEQ ID NO: 12124 - RNA, 80 nt, synthetic construct
  source 1..80: mol_type = other RNA
aaaaaaaaaaaaaaaaaaaaaaaaaaaaataaataaaaaaataaataaataaataaatataaataaaaaaaaaaaatata

SEQ ID NO: 12125 - RNA, 80 nt, synthetic construct
  source 1..80: mol_type = other RNA
aaaaaaaaaaaaaataaataaataaataaataaataaataaataaaaaaaaaaaaaaatataaaaaaaaaaaaaaatata

SEQ ID NO: 12126 - RNA, 80 nt, synthetic construct
  source 1..80: mol_type = other RNA
aaaaaaaaaaaaaataaataaataaataaataaataaataaaaaaaaaaaaaaaaaaatataaaaaaaaaaataaatata

SEQ ID NO: 12127 - RNA, 80 nt, synthetic construct
  source 1..80: mol_type = other RNA
aaaaaaaaaaaaaaaaaataaataaataaataaataaataaataaaaaaaaaaaaaaatataaaaaaaaaaataaatata

SEQ ID NO: 12128 - RNA, 80 nt, synthetic construct
  source 1..80: mol_type = other RNA
aaaaaaaaaaaaaaaaaataaataaataaataaataaataaaaaaaaaaaaaaaaaaatataaaaaaataaataaatata

SEQ ID NO: 12129 - RNA, 80 nt, synthetic construct
  source 1..80: mol_type = other RNA
aaaaaaaaaaaaaaaaaaaaaaaaataaataaaaaaataaataaataaataaataaatataaataaaaaaaaaaaatata

SEQ ID NO: 12130 - RNA, 80 nt, synthetic construct
  source 1..80: mol_type = other RNA
aaaaaaaaaaaaaaaaaaaaaaaaataaataaataaaaaaataaataaataaataaatataaataaaaaaaaaaaatata

SEQ ID NO: 12131 - RNA, 80 nt, synthetic construct
  source 1..80: mol_type = other RNA
aaaaaaaaaaaaaaaaaaaaaaaaataaaaaaataaataaataaataaataaataaatataaataaaaaaaaaaaatata

SEQ ID NO: 12132 - RNA, 81 nt, synthetic construct
  source 1..81: mol_type = other RNA
aaaaaaaaaaaaaaaaaaaaaaaaaaaaaaaaaaaaaaaaaaaaaaaaaaaaaaaaaaaaaaaaaaaaaaaaaaaaataaa

SEQ ID NO: 12133 - RNA, 81 nt, synthetic construct
  source 1..81: mol_type = other RNA
aaaaaaaaaaaaaaaaaaaaaaaaaaaaaaaaaaaaaaaaaaaaaaaataaaaaaaaaataaataaataaataaatatata

SEQ ID NO: 12134 - RNA, 81 nt, synthetic construct
  source 1..81: mol_type = other RNA
aaaaaaaaaaaaaaaaaaaaaaaaaaaaaataaaaaaaaaaaaaaaaaaaaaaaaaaaaaaaaaaaaaaaaaaaaaataaa

SEQ ID NO: 12135 - RNA, 81 nt, synthetic construct
  source 1..81: mol_type = other RNA
aaaaaaaaaaaaaaaaaaaaaaaaaaaaaaaaaaaaaaaaaaaaaaaataaaaaataaataaataaataaataaatatata

SEQ ID NO: 12136 - RNA, 81 nt, synthetic construct
  source 1..81: mol_type = other RNA
aaaaaaaaaaaaaaaaaaaaaaaaaataaataaaaaaaaaaaaaaaaaaaaaaaaaaaaaaaaaaaaaaaaaaaaaataaa

SEQ ID NO: 12137 - RNA, 81 nt, synthetic construct
  source 1..81: mol_type = other RNA
aaaaaaaaaaaaaaaaaaaaaaaaaataaataaataaaaaaaaaaaaaaaaaaaaaaaaaaaaaaaaaaaaaaaaaataaa

SEQ ID NO: 12138 - RNA, 81 nt, synthetic construct
  source 1..81: mol_type = other RNA
aaaaaaaaaaaaaaaaaaaaaataaataaataaaaaaaaaaaaaaaaaaaaaaaaaaaaaaaaaaaaaaaaaaaaaataaa

SEQ ID NO: 12139 - RNA, 81 nt, synthetic construct
  source 1..81: mol_type = other RNA
aaaaaaaaaaaaaaaaaaaaaataaataaataaataaaaaaaaaaaaaaaaaaaaaaaaaaaaaaaaaaaaaaaaaataaa

SEQ ID NO: 12140 - RNA, 81 nt, synthetic construct
  source 1..81: mol_type = other RNA
aaataaaaaaaaaaaaaaaaaaaaaaaaaaaaaaaaaaaaaaaaaaaaaaataaataaatataaatataaatataaatata

SEQ ID NO: 12141 - RNA, 81 nt, synthetic construct
  source 1..81: mol_type = other RNA
aaataaaaaaaaaaaaaaaaaaaaaaaaaaaaaaaaaaaaaaaaaaataaataaataaatataaatataaatataaatata

SEQ ID NO: 12142 - RNA, 81 nt, synthetic construct
  source 1..81: mol_type = other RNA
aaataaataaaaaaaaaaaaaaaaaaaaaaaaaaaaaaaaaaaaaaaaaaataaataaatataaatataaatataaatata

SEQ ID NO: 12143 - RNA, 81 nt, synthetic construct
  source 1..81: mol_type = other RNA
aaaaaaaaaaaaaaaaaaaaaaaaaaaaaaataaataaataaataaaaaaaaaaaaaataaataaataaataaataaataa

SEQ ID NO: 12144 - RNA, 81 nt, synthetic construct
  source 1..81: mol_type = other RNA
aaataaataaaaaaaaaaaaaaaaaaaaaaaaaaaaaaaaaaaaaaataaataaataaatataaatataaatataaatata

SEQ ID NO: 12145 - RNA, 81 nt, synthetic construct
  source 1..81: mol_type = other RNA
aaaaaaaaaaaaaaaaaaaaaaaaaaaaaaataaataaataaataaataaaaaaaaaataaataaataaataaataaataa

SEQ ID NO: 12146 - RNA, 81 nt, synthetic construct
  source 1..81: mol_type = other RNA
aaaaaaaaaaaaaaaaaaaaaaaaaaataaataaataaataaataaaaaaaaaaaaaataaataaataaataaataaataa

SEQ ID NO: 12147 - RNA, 81 nt, synthetic construct
  source 1..81: mol_type = other RNA
aaataaaaaaaaaaaaaaaaaaaaaaaaaaaaaaaaaaaaaaaaaaaaaaataaataaatataaatataaataaatatata

SEQ ID NO: 12148 - RNA, 81 nt, synthetic construct
  source 1..81: mol_type = other RNA
aaataaataaaaaaaaaaaaaaaaaaaaaaaaaaaaaaaaaaaaaaaaaaataaataaatataaatataaataaatatata

SEQ ID NO: 12149 - RNA, 81 nt, synthetic construct
  source 1..81: mol_type = other RNA
aaataaaaaaaaaaaaaaaaaaaaaaaaaaaaaaaaaaaaaaaaaaataaataaataaatataaatataaataaatatata

SEQ ID NO: 12150 - RNA, 81 nt, synthetic construct
  source 1..81: mol_type = other RNA
aaataaataaaaaaaaaaaaaaaaaaaaaaaaaaaaaaaaaaaaaaataaataaataaatataaatataaataaatatata

SEQ ID NO: 12151 - RNA, 81 nt, synthetic construct
  source 1..81: mol_type = other RNA
aaatataaaaaaaaaaaaaaaaaaaaaaaaaaaaaaaaaaaaaaaaaaaaataaataaatataaatataaatataaatata

SEQ ID NO: 12152 - RNA, 81 nt, synthetic construct
  source 1..81: mol_type = other RNA
aaatataaaaaaaaaaaaaaaaaaaaaaaaaaaaaaaaaaaaaaaaataaataaataaatataaatataaatataaatata

SEQ ID NO: 12153 - RNA, 81 nt, synthetic construct
  source 1..81: mol_type = other RNA
aaaaaaaaaaaaaaaaaaaaaaaaaaaaaaataaataaataaataaaaaaaaaaaatataaataaataaataaataaataa

SEQ ID NO: 12154 - RNA, 81 nt, synthetic construct
  source 1..81: mol_type = other RNA
aaatataaataaaaaaaaaaaaaaaaaaaaaaaaaaaaaaaaaaaaataaataaataaatataaatataaatataaatata

SEQ ID NO: 12155 - RNA, 81 nt, synthetic construct
  source 1..81: mol_type = other RNA
aaaaaaaaaaaaaaaaaaaaaaaaaaaaaaataaataaataaataaataaaaaaaatataaataaataaataaataaataa

SEQ ID NO: 12156 - RNA, 81 nt, synthetic construct
  source 1..81: mol_type = other RNA
aaatataaaaaaaaaaaaaaaaaaaaaaaaaaaaaaaaaaaaaaaaaaaaataaataaatataaatataaataaatatata

SEQ ID NO: 12157 - RNA, 81 nt, synthetic construct
  source 1..81: mol_type = other RNA
aaaaaaaaaaaaaaaaaaaaaaaaaataaataaaaaaaaaaaaaaaaaaaaaaaaaaaaaaaaaaaaaaaaaaaaaataat

SEQ ID NO: 12158 - RNA, 81 nt, synthetic construct
  source 1..81: mol_type = other RNA
aaatataaaaaaaaaaaaaaaaaaaaaaaaaaaaaaaaaaaaaaaaataaataaataaatataaatataaataaatatata

SEQ ID NO: 12159 - RNA, 81 nt, synthetic construct
  source 1..81: mol_type = other RNA
aaatataaataaaaaaaaaaaaaaaaaaaaaaaaaaaaaaaaaaaaaaaaataaataaatataaatataaataaatatata

SEQ ID NO: 12160 - RNA, 81 nt, synthetic construct
  source 1..81: mol_type = other RNA
aaaaaaaaaaaaaaaaaaaaaaaaaataaataaataaaaaaaaaaaaaaaaaaaaaaaaaaaaaaaaaaaaaaaaaataat

SEQ ID NO: 12161 - RNA, 81 nt, synthetic construct
  source 1..81: mol_type = other RNA
aaatataaataaaaaaaaaaaaaaaaaaaaaaaaaaaaaaaaaaaaataaataaataaatataaatataaataaatatata

SEQ ID NO: 12162 - RNA, 81 nt, synthetic construct
  source 1..81: mol_type = other RNA
aaataaatataaaaaaaaaaaaaaaaaaaaaaaaaaaaaaaaaaaaataaataaataaatataaatataaataaatatata

SEQ ID NO: 12163 - RNA, 81 nt, synthetic construct
  source 1..81: mol_type = other RNA
aaaaaaaaaaaaaaaaaaaaaaaaaaaaaaaaaaaaaaaaaaaaaaaataaaaaaaaaataaataaataaataaaaatata

SEQ ID NO: 12164 - RNA, 81 nt, synthetic construct
  source 1..81: mol_type = other RNA
aaaaaaaaaaaaaaaaaaaaataaataaatataaataaatataaatataaataaataaaaaaaaaaaaataaataaatata

SEQ ID NO: 12165 - RNA, 81 nt, synthetic construct
  source 1..81: mol_type = other RNA
aaataaaaaaaaaaaaaaaaaaaaaaaaaaaaaaaaaaaaaaaaaaaaaaataaataaatataaatataaataaaaatata

SEQ ID NO: 12166 - RNA, 81 nt, synthetic construct
  source 1..81: mol_type = other RNA
aaataaataaaaaaaaaaaaaaaaaaaaaaaaaaaaaaaaaaaaaaaaaaataaataaatataaatataaataaaaatata

SEQ ID NO: 12167 - RNA, 81 nt, synthetic construct
  source 1..81: mol_type = other RNA
aaataaaaaaaaaaaaaaaaaaaaaaaaaaaaaaaaaaaaaaaaaaataaataaataaatataaatataaataaaaatata

SEQ ID NO: 12168 - RNA, 81 nt, synthetic construct
  source 1..81: mol_type = other RNA
aaataaataaaaaaaaaaaaaaaaaaaaaaaaaaaaaaaaaaaaaaataaataaataaatataaatataaataaaaatata

SEQ ID NO: 12169 - RNA, 81 nt, synthetic construct
  source 1..81: mol_type = other RNA
aaaaaaaaaaaaaaaaaaaaaaaaaaaaaaataaatataaatataaaaaaaaaaaaaataaataaataaataaataaataa

SEQ ID NO: 12170 - RNA, 81 nt, synthetic construct
  source 1..81: mol_type = other RNA
aaaaaaaaaaaaaaaaaaaaaaaaaaaaaaataaatataaatataaataaaaaaaaaataaataaataaataaataaataa

SEQ ID NO: 12171 - RNA, 81 nt, synthetic construct
  source 1..81: mol_type = other RNA
aaaaaaaaaaaaaaaaaaaaaaaaaaaaaaaaaaaaaaaaaaaaaaaataaaaaaaaaataaataaatatataaatatata

SEQ ID NO: 12172 - RNA, 81 nt, synthetic construct
  source 1..81: mol_type = other RNA
aaaaaaaaaaaaaaaaaaaaaaaaaaaaaaataaatatataaataaaaaaaaaaaaaataaataaataaataaataaataa

SEQ ID NO: 12173 - RNA, 81 nt, synthetic construct
  source 1..81: mol_type = other RNA
aaaaaaaaaaaaaaaaaaaaaaaaaaaaaaataaataaataaataaaaaaaaaaaaaataaataaataaatatataaataa

SEQ ID NO: 12174 - RNA, 81 nt, synthetic construct
  source 1..81: mol_type = other RNA
aaaaaaaaaaaaaaaaaaaaaaaaaaaaaaataaataaataaataaaaaaaaaaaaaataaataaatatataaataaataa

SEQ ID NO: 12175 - RNA, 81 nt, synthetic construct
  source 1..81: mol_type = other RNA
aaaaaaaaaaaaaaaaaaaaaaaaaaaaaaataaataaatatataaataaaaaaaaaataaataaataaataaataaataa

SEQ ID NO: 12176 - RNA, 81 nt, synthetic construct
  source 1..81: mol_type = other RNA
aaaaaaaaaaaaaaaaaaaaaaaaaaaaaaaaaaaaaaaaaaaaaaaataaaaaaaaaataaataaataaatatatatata

SEQ ID NO: 12177 - RNA, 81 nt, synthetic construct
  source 1..81: mol_type = other RNA
aaatatataaaaaaaaaaaaaaaaaaaaaaaaaaaaaaaaaaaaaaaaaaataaataaatataaatataaataaatatata

SEQ ID NO: 12178 - RNA, 81 nt, synthetic construct
  source 1..81: mol_type = other RNA
aaaaaaaaataaaaaaaaaaaaaaaaaaaaaaaaaaaaaaaaaaaaaataaaaaaaaaataaataaataaataaatatata

SEQ ID NO: 12179 - RNA, 81 nt, synthetic construct
  source 1..81: mol_type = other RNA
aaaaaaaaaaaaaaaaaaataaaaaaaaaaaaaaaaaaaaaaaaaaaataaaaaaaaaataaataaataaataaatatata

SEQ ID NO: 12180 - RNA, 81 nt, synthetic construct
  source 1..81: mol_type = other RNA
aaaaaaaaaaaaaaaaaaaaaaaaataaaaaaaaaaaaaaaaaaaaaataaaaaaaaaataaataaataaataaatatata

SEQ ID NO: 12181 - RNA, 81 nt, synthetic construct
  source 1..81: mol_type = other RNA
aaaaaaaaaaaaaaaaaaaaaaaaaaaaaaaaaaaaataaaaaaaaaataaaaaaaaaataaataaataaataaatatata

SEQ ID NO: 12182 - RNA, 81 nt, synthetic construct
  source 1..81: mol_type = other RNA
aaaaaaaaaaaaaaaaaaaaaaaaaaaaaataaaaaaaaaaaaaaaaaaaaaaaaaaaaaaaataaaaaaaaaaaaataaa

SEQ ID NO: 12183 - RNA, 81 nt, synthetic construct
  source 1..81: mol_type = other RNA
aaaaaaaaaaaaaaaaaaaaaaataaaaaataaaaaaaaaaaaaaaaaaaaaaaaaaaaaaaaaaaaaaaaaaaaaataaa

SEQ ID NO: 12184 - RNA, 81 nt, synthetic construct
  source 1..81: mol_type = other RNA
aaaaaaaaaaaaaaaaaaaaaaaaaaaaaataaaaaaaaaataaaaaaaaaaaaaaaaaaaaaaaaaaaaaaaaaaataaa

SEQ ID NO: 12185 - RNA, 81 nt, synthetic construct
  source 1..81: mol_type = other RNA
aaaaaaaaaaaaaaaaaaaaaaaaaaaaaataaaaaaaaaaaaaaaaaaataaaaaaaaaaaaaaaaaaaaaaaaaataaa

SEQ ID NO: 12186 - RNA, 81 nt, synthetic construct
  source 1..81: mol_type = other RNA
aaaaaaaaaaaaaaaaaaaaaaaaaaaaaataaaaaaaaataaaaaaaaaaaaaaaaaaaaaaaaaaaaaaaaaaaataaa

SEQ ID NO: 12187 - RNA, 81 nt, synthetic construct
  source 1..81: mol_type = other RNA
aaaaaaaaataaaaaaaaaaaaaaaaaaaaaaaaaaaaaaaaaaaaaataaaaaataaataaataaataaataaatatata

SEQ ID NO: 12188 - RNA, 81 nt, synthetic construct
  source 1..81: mol_type = other RNA
aaataaaaaaaaaaaaaaaaaaaaaaaaaaaaaaaaaaaaaaaaaaaaaaataaataaatataaatataaatatatatata

SEQ ID NO: 12189 - RNA, 81 nt, synthetic construct
  source 1..81: mol_type = other RNA
aaaaaaaaaaaaaaaaaaaaaaaaaataaataaaaaaaaaaaaaaaaaaataaaaaaaaaaaaaaaaaaaaaaaaaataaa

SEQ ID NO: 12190 - RNA, 81 nt, synthetic construct
  source 1..81: mol_type = other RNA
aaaaaaaaaaaaaaaaaaaaaaaaaataaataaaaaaaaaaaaaaaaaaaaataaaaaaaaaaaaaaaaaaaaaaaataaa

SEQ ID NO: 12191 - RNA, 81 nt, synthetic construct
  source 1..81: mol_type = other RNA
aaaaaaaaaaaaaaaaaaaaaaaaaataaataaaaaaaaaaaaaaaaaaaaaaaaaaaaataaaaaaaaaaaaaaaataaa

SEQ ID NO: 12192 - RNA, 81 nt, synthetic construct
  source 1..81: mol_type = other RNA
aaaaaaaaaaaaaaaaaaaaaaaaaataaataaaaaaaaaaaaaaaaaaaaaaaaataaaaaaaaaaaaaaaaaaaataaa

SEQ ID NO: 12193 - RNA, 81 nt, synthetic construct
  source 1..81: mol_type = other RNA
aaaaaaaaaaaaaaaaaaaaaaaaaataaataaaaaaaaaaaaaaaaataaaaaaaaaaaaaaaaaaaaaaaaaaaataaa

SEQ ID NO: 12194 - RNA, 81 nt, synthetic construct
  source 1..81: mol_type = other RNA
aaaaaaaaaaaaaaaaaaaaaaaaaataaataaaaaaaaaaaaataaaaaaaaaaaaaaaaaaaaaaaaaaaaaaaataaa

SEQ ID NO: 12195 - RNA, 81 nt, synthetic construct
  source 1..81: mol_type = other RNA
aaaaaaaaaaaaaaataaaaaaaaaataaataaaaaaaaaaaaaaaaaaaaaaaaaaaaaaaaaaaaaaaaaaaaaataaa

SEQ ID NO: 12196 - RNA, 81 nt, synthetic construct
  source 1..81: mol_type = other RNA
aaaaaaaaaaaaaaaaaaaaaaaaaataaataaaaaaaaaaaaaaaaaaaaaaaaaataaaaaaaaaaaaaaaaaaataaa

SEQ ID NO: 12197 - RNA, 81 nt, synthetic construct
  source 1..81: mol_type = other RNA
aaataaaaaaaaaaaaaaaaaaaaaaaaaaaaaaaaaaaaaaaaaaaaaaataaaaaaatataaatataaatataaatata

SEQ ID NO: 12198 - RNA, 81 nt, synthetic construct
  source 1..81: mol_type = other RNA
aaataaaaaaaaaaaaaaaaaaaaaaaaaaaaaaaaaaaaaaaaaaataaataaataaatataaatataaatatatatata

SEQ ID NO: 12199 - RNA, 81 nt, synthetic construct
  source 1..81: mol_type = other RNA
aaataaataaaaaaaaaaaaaaaaaaaaaaaaaaaaaaaaaaaaaaaaaaataaataaatataaatataaatatatatata

SEQ ID NO: 12200 - RNA, 81 nt, synthetic construct
  source 1..81: mol_type = other RNA
aaaaaaaaaaaaaaaaaaaaaaaaaataaataaataaaaaaaaaaaaaaataaaaaaaaaaaaaaaaaaaaaaaaaataaa

SEQ ID NO: 12201 - RNA, 81 nt, synthetic construct
  source 1..81: mol_type = other RNA
aaaaaaaaaaaaaaaaaaaaaataaataaataaaaaaaaaaaaaaaaaaataaaaaaaaaaaaaaaaaaaaaaaaaataaa

SEQ ID NO: 12202 - RNA, 81 nt, synthetic construct
  source 1..81: mol_type = other RNA
aaaaaaaaaaaaaaaaaaaaaaaaaataaataaataaaaaaaaaaaaataaaaaaaaaaaaaaaaaaaaaaaaaaaataaa

SEQ ID NO: 12203 - RNA, 81 nt, synthetic construct
  source 1..81: mol_type = other RNA
aaaaaaaaaaaaaaaaaaaaaaaaaataaataaaaaaaaaaaaaaaaataaataaaaaaaaaaaaaaaaaaaaaaaataaa

SEQ ID NO: 12204 - RNA, 81 nt, synthetic construct
  source 1..81: mol_type = other RNA
aaaaaaaaaaaaaaaaaaaaaaaaaataaataaataaaaaaaaaaaaaaaaaaaaaaaaataaaaaaaaaaaaaaaataaa

SEQ ID NO: 12205 - RNA, 81 nt, synthetic construct
  source 1..81: mol_type = other RNA
aaaaaaaaaaaaaaaaaaaaaaaaaataaataaataaaaaaaaaaaaaaaaataaaaaaaaaaaaaaaaaaaaaaaataaa

SEQ ID NO: 12206 - RNA, 81 nt, synthetic construct
  source 1..81: mol_type = other RNA
aaaaaaaaaaaaaaaaaaaaaataaataaataaaaaaaaaaaaaaaaaaaaataaaaaaaaaaaaaaaaaaaaaaaataaa

SEQ ID NO: 12207 - RNA, 81 nt, synthetic construct
  source 1..81: mol_type = other RNA
aaaaaaaaaaaaaaaaaaaaaaaaaataaataaaaaaaaaaaaaaaaaaaaataaataaaaaaaaaaaaaaaaaaaataaa

SEQ ID NO: 12208 - RNA, 81 nt, synthetic construct
  source 1..81: mol_type = other RNA
aaaaaaaaaaaaaaaaaaaaaaaaaataaataaaaaaaaaaaaataaataaaaaaaaaaaaaaaaaaaaaaaaaaaataaa

SEQ ID NO: 12209 - RNA, 81 nt, synthetic construct
  source 1..81: mol_type = other RNA
aaaaaaaaaaaaaaaaaaaaaaaaaataaataaataaaaaaaaaaaaaaaaaaaaataaaaaaaaaaaaaaaaaaaataaa

SEQ ID NO: 12210 - RNA, 81 nt, synthetic construct
  source 1..81: mol_type = other RNA
aaaaaaaaaaaaaaaaaaaaaataaataaataaaaaaaaaaaaaaaaaaaaaaaaaaaaataaaaaaaaaaaaaaaataaa

SEQ ID NO: 12211 - RNA, 81 nt, synthetic construct
  source 1..81: mol_type = other RNA
aaatataaaaaaaaaaaaaaaaaaaaaaaaaaaaaaaaaaaaaaaaaaaaataaataaatataaatataaataaaaatata

SEQ ID NO: 12212 - RNA, 81 nt, synthetic construct
  source 1..81: mol_type = other RNA
aaaaaaaaaaaaaaaaaaaaaataaataaataaataaaaaaaaaaaaaaataaaaaaaaaaaaaaaaaaaaaaaaaataaa

SEQ ID NO: 12213 - RNA, 81 nt, synthetic construct
  source 1..81: mol_type = other RNA
aaaaaaaaaaaaaaaaaaaaaaaaaataaataaataaaaaaaaataaataaaaaaaaaaaaaaaaaaaaaaaaaaaataaa

SEQ ID NO: 12214 - RNA, 81 nt, synthetic construct
  source 1..81: mol_type = other RNA
aaaaaaaaaaaaaaaaaaaaaaaaaataaataaaaaaaaaaaaaaaaaaaaataaataaataaaaaaaaaaaaaaaataaa

SEQ ID NO: 12215 - RNA, 81 nt, synthetic construct
  source 1..81: mol_type = other RNA
aaaaaaaaaaaaaaaaaaaaaaaaaataaataaataaaaaaaaaaaaataaataaaaaaaaaaaaaaaaaaaaaaaataaa

SEQ ID NO: 12216 - RNA, 81 nt, synthetic construct
  source 1..81: mol_type = other RNA
aaaaaaaaaaaaaaaaaaaaaaaaaataaataaataaaaaaaaaaaaaaaaataaataaaaaaaaaaaaaaaaaaaataaa

SEQ ID NO: 12217 - RNA, 81 nt, synthetic construct
  source 1..81: mol_type = other RNA
aaaaaaaaaaaaaaaaaaaaaaaaaataaataaaaaaaaaaaaataaataaataaaaaaaaaaaaaaaaaaaaaaaataaa

SEQ ID NO: 12218 - RNA, 81 nt, synthetic construct
  source 1..81: mol_type = other RNA
aaaaaaaaaaaaaaaaaaaaaataaataaataaaaaaaaaaaaaaaaaaaaataaataaaaaaaaaaaaaaaaaaaataaa

SEQ ID NO: 12219 - RNA, 81 nt, synthetic construct
  source 1..81: mol_type = other RNA
aaaaaaaaaaaaaaaaaaaaaaaaaataaataaataaaaaaaaaaaaaaaaaaaaataaataaaaaaaaaaaaaaaataaa

SEQ ID NO: 12220 - RNA, 81 nt, synthetic construct
  source 1..81: mol_type = other RNA
aaaaaaaaaaaaaaaaaaaaaataaataaataaataaaaaaaaaaaaaaaaataaaaaaaaaaaaaaaaaaaaaaaataaa

SEQ ID NO: 12221 - RNA, 81 nt, synthetic construct
  source 1..81: mol_type = other RNA
aaaaaaaaaaaaaaaaaaaaaataaataaataaataaaaaaaaaaaaataaaaaaaaaaaaaaaaaaaaaaaaaaaataaa

SEQ ID NO: 12222 - RNA, 81 nt, synthetic construct
  source 1..81: mol_type = other RNA
aaaaaaaaaaaaaaaaaaaaaaaaaataaataaaaaaaaaaaaaaaaataaataaataaaaaaaaaaaaaaaaaaaataaa

SEQ ID NO: 12223 - RNA, 81 nt, synthetic construct
  source 1..81: mol_type = other RNA
aaatataaataaaaaaaaaaaaaaaaaaaaaaaaaaaaaaaaaaaaaaaaataaataaatataaatataaataaaaatata

SEQ ID NO: 12224 - RNA, 81 nt, synthetic construct
  source 1..81: mol_type = other RNA
aaatataaaaaaaaaaaaaaaaaaaaaaaaaaaaaaaaaaaaaaaaataaataaataaatataaatataaataaaaatata

SEQ ID NO: 12225 - RNA, 81 nt, synthetic construct
  source 1..81: mol_type = other RNA
aaataaaaaaaaaaaaaaaaaaaaaaaataaaaaaaaaaaaaaaaaaaaaataaataaatataaatataaatataaatata

SEQ ID NO: 12226 - RNA, 81 nt, synthetic construct
  source 1..81: mol_type = other RNA
aaataaaataaaaaaaaaaaaaaaaaaaaaaaaaaaaaaaaaaaaaaaaaataaataaatataaatataaatataaatata

SEQ ID NO: 12227 - RNA, 81 nt, synthetic construct
  source 1..81: mol_type = other RNA
aaataaaaaaataaaaaaaaaaaaaaaaaaaaaaaaaaaaaaaaaaaaaaataaataaatataaatataaatataaatata

SEQ ID NO: 12228 - RNA, 81 nt, synthetic construct
  source 1..81: mol_type = other RNA
aaataaaaaaaaaaaaaaaaaaaaaaaaaaaaaaaataaaaaaaaaaaaaataaataaatataaatataaatataaatata

SEQ ID NO: 12229 - RNA, 81 nt, synthetic construct
  source 1..81: mol_type = other RNA
aaataaaaaaaaaaaaaaaaaaaaaataaaaaaaaaaaaaaaaaaaaaaaataaataaatataaatataaatataaatata

SEQ ID NO: 12230 - RNA, 81 nt, synthetic construct
  source 1..81: mol_type = other RNA
aaataaaaaaaaaaaaaaaaaaaaaaaaaaaaaaaaaaaaaataaaaaaaataaataaatataaatataaatataaatata

SEQ ID NO: 12231 - RNA, 81 nt, synthetic construct
  source 1..81: mol_type = other RNA
aaataaaaaaaaaaaaaaaaaaaaaaaaaaaaaaaaaaaaaaaaataaaaataaataaatataaatataaatataaatata

SEQ ID NO: 12232 - RNA, 81 nt, synthetic construct
  source 1..81: mol_type = other RNA
aaataaaaaaaaaaaaaaaaaaaaaaataaaaaaaaaaaaaaaaaaaaaaataaataaatataaatataaatataaatata

SEQ ID NO: 12233 - RNA, 81 nt, synthetic construct
  source 1..81: mol_type = other RNA
aaataaaaaaaaaaaaaaaaaaaaaaaaaaaaaaaaaaataaaaaaaaaaataaataaatataaatataaatataaatata

SEQ ID NO: 12234 - RNA, 81 nt, synthetic construct
  source 1..81: mol_type = other RNA
aaataaaaataaaaaaaaaaaaaaaaaaaaaaaaaaaaaaaaaaaaaaaaataaataaatataaatataaatataaatata

SEQ ID NO: 12235 - RNA, 81 nt, synthetic construct
  source 1..81: mol_type = other RNA
aaataaaaaaaaaaaaataaaaaaaaaaaaaaaaaaaaaaaaaaaaaaaaataaataaatataaatataaatataaatata

SEQ ID NO: 12236 - RNA, 82 nt, synthetic construct
  source 1..82: mol_type = other RNA
aaataaatataaataaatataaaaaaaaaaaaaaaaaaaaaaaaaaaaaaaaaaaaaaaaaaaaaaaaaaaaaaaaaatata

SEQ ID NO: 12237 - RNA, 82 nt, synthetic construct
  source 1..82: mol_type = other RNA
aaataaatataaatatatataaaaaaaaaaaaaaaaaaaaaaaaaaaaaaaaaaaaaaaaaaaaaaaaaaaaaaaaaatata

SEQ ID NO: 12238 - RNA, 82 nt, synthetic construct
  source 1..82: mol_type = other RNA
aaataaatataaataaatataaaaaaaaaaaaaaaaaaaaaaaaaaaaaaaaaaaaaaaaaaataaaaaaaaaaaaaatata

SEQ ID NO: 12239 - RNA, 82 nt, synthetic construct
  source 1..82: mol_type = other RNA
aaataaatataaatataaataaaaaaaaaaaaaaaaaaaaaaaaaaaaaaaaaaaaaaaaaaataaaaaaaaaaaaaatata

SEQ ID NO: 12240 - RNA, 82 nt, synthetic construct
  source 1..82: mol_type = other RNA
aaatataaataaataaatataaaaaaaaaaaaaaaaaaaaaaaaaaaaaaaaaaaaaaaaaaataaaaaaaaaaaaaatata

SEQ ID NO: 12241 - RNA, 82 nt, synthetic construct
  source 1..82: mol_type = other RNA
aaataaatataaataaatataaaaaaaaaaaaaaaaaaaaaaaaaaaaaaaaaaaataaaaaaaaaaaaaaaaaaaaatata

SEQ ID NO: 12242 - RNA, 82 nt, synthetic construct
  source 1..82: mol_type = other RNA
aaataaatataaataaatataaaaaaaaaaaaaaaaaaaaaaaaaaaaaaaaaaataaaaaaaaaaaaaaaaaaaaaatata

SEQ ID NO: 12243 - RNA, 82 nt, synthetic construct
  source 1..82: mol_type = other RNA
aaataaatataaataaatataaaaaaaaaaaaaaaaaaaaaaaaaaaaaaaaaaaaaaaaaaataaaaaaaaaataaatata

SEQ ID NO: 12244 - RNA, 82 nt, synthetic construct
  source 1..82: mol_type = other RNA
aaataaatataaataaatataaataaaaaaaaaaaaaaaaaaaaaaaaaaaaaaaaaaaaaaataaaaaaaaaaaaaatata

SEQ ID NO: 12245 - RNA, 82 nt, synthetic construct
  source 1..82: mol_type = other RNA
aaataaatataaataaatataaaaaaaaaaaaaaaaaaaaaaaaaaaaaaaaaaaaaaataaataaaaaaaaaaaaaatata

SEQ ID NO: 12246 - RNA, 82 nt, synthetic construct
  source 1..82: mol_type = other RNA
aaataaatataaatataaataaaaaaaaaaaaaaaaaaaaaaaaaaaaaaaaaaaaaaaaaaataaaaaaaaaataaatata

SEQ ID NO: 12247 - RNA, 82 nt, synthetic construct
  source 1..82: mol_type = other RNA
aaatataaataaataaatataaaaaaaaaaaaaaaaaaaaaaaaaaaaaaaaaaaaaaaaaaataaaaaaaaaataaatata

SEQ ID NO: 12248 - RNA, 82 nt, synthetic construct
  source 1..82: mol_type = other RNA
aaataaatataaatataaataaaaaaaaaaaaaaaaaaaaaaaaaaaaaaaaaaaaaaataaataaaaaaaaaaaaaatata

SEQ ID NO: 12249 - RNA, 82 nt, synthetic construct
  source 1..82: mol_type = other RNA
aaataaatataaataaatataaaaaaaaaaaaaaaaaaaaaaaaaaaaaaaaaaaaaaataaataaaaaaaaaataaatata

SEQ ID NO: 12250 - RNA, 82 nt, synthetic construct
  source 1..82: mol_type = other RNA
aaataaatataaataaatataaataaaaaaaaaaaaaaaaaaaaaaaaaaaaaaaaaaaaaaataaaaaaaaaataaatata

SEQ ID NO: 12251 - RNA, 82 nt, synthetic construct
  source 1..82: mol_type = other RNA
aaataaatataaataaatataaaaaaaaaaaaaaaaaaaaaaaaaaaaaaaaaaaaaaaaaaataaaaaataaataaatata

SEQ ID NO: 12252 - RNA, 82 nt, synthetic construct
  source 1..82: mol_type = other RNA
aaataaatataaatataaataaaaaaaaaaaaaaaaaaaaaaaaaaaaaaaaaaaaaaataaataaaaaaaaaataaatata

SEQ ID NO: 12253 - RNA, 82 nt, synthetic construct
  source 1..82: mol_type = other RNA
aaatataaataaataaatataaaaaaaaaaaaaaaaaaaaaaaaaaaaaaaaaaaaaaaaaaataaaaaataaataaatata

SEQ ID NO: 12254 - RNA, 82 nt, synthetic construct
  source 1..82: mol_type = other RNA
aaataaatataaatataaataaaaaaaaaaaaaaaaaaaaaaaaaaaaaaaaaaaaaaaaaaataaaaaataaataaatata

SEQ ID NO: 12255 - RNA, 82 nt, synthetic construct
  source 1..82: mol_type = other RNA
aaataaatataaatataaataaataaaaaaaaaaaaaaaaaaaaaaaaaaaaaaaaaaaaaaataaaaaaaaaataaatata

SEQ ID NO: 12256 - RNA, 82 nt, synthetic construct
  source 1..82: mol_type = other RNA
aaataaatataaatataaataaataaaaaaaaaaaaaaaaaaaaaaaaaaaaaaaaaaataaataaaaaaaaaaaaaatata

SEQ ID NO: 12257 - RNA, 82 nt, synthetic construct
  source 1..82: mol_type = other RNA
aaataaatataaataaatataaataaaaaaaaaaaaaaaaaaaaaaaaaaaaaaaaaaataaataaaaaaaaaaaaaatata

SEQ ID NO: 12258 - RNA, 82 nt, synthetic construct
  source 1..82: mol_type = other RNA
aaatataaataaataaatataaaaaaaaaaaaaaaaaaaaaaaaaaaaaaaaaaaaaaataaataaaaaaaaaataaatata

SEQ ID NO: 12259 - RNA, 82 nt, synthetic construct
  source 1..82: mol_type = other RNA
aaataaatataaataaatataaaaaaaaaaaaaaaaaaaaaaaaaaaaaaaaaaaaaaataaataaaaaataaataaatata

SEQ ID NO: 12260 - RNA, 82 nt, synthetic construct
  source 1..82: mol_type = other RNA
aaataaatataaataaatataaataaaaaaaaaaaaaaaaaaaaaaaaaaaaaaaaaaataaataaaaaaaaaataaatata

SEQ ID NO: 12261 - RNA, 82 nt, synthetic construct
  source 1..82: mol_type = other RNA
aaataaatataaataaatataaataaaaaaaaaaaaaaaaaaaaaaaaaaaaaaaaaaaaaaataaaaaataaataaatata

SEQ ID NO: 12262 - RNA, 82 nt, synthetic construct
  source 1..82: mol_type = other RNA
aaataaatataaatataaataaaaaaaaaaaaaaaaaaaaaaaaaaaaaaaaaaaaaaataaataaaaaataaataaatata

SEQ ID NO: 12263 - RNA, 82 nt, synthetic construct
  source 1..82: mol_type = other RNA
aaatataaataaataaatataaaaaaaaaaaaaaaaaaaaaaaaaaaaaaaaaaaaaaataaataaaaaataaataaatata

SEQ ID NO: 12264 - RNA, 82 nt, synthetic construct
  source 1..82: mol_type = other RNA
aaataaatataaatataaataaataaaaaaaaaaaaaaaaaaaaaaaaaaaaaaaaaaaaaaataaaaaataaataaatata

SEQ ID NO: 12265 - RNA, 82 nt, synthetic construct
  source 1..82: mol_type = other RNA
aaataaatataaatataaataaataaaaaaaaaaaaaaaaaaaaaaaaaaaaaaaaaaataaataaaaaaaaaataaatata

SEQ ID NO: 12266 - RNA, 82 nt, synthetic construct
  source 1..82: mol_type = other RNA
aaataaatataaataaatataaataaaaaaaaaaaaaaaaaaaaaaaaaaaaaaaaaaataaataaaaaataaataaatata

SEQ ID NO: 12267 - RNA, 82 nt, synthetic construct
  source 1..82: mol_type = other RNA
aaataaatataaatataaataaataaaaaaaaaaaaaaaaaaaaaaaaaaaaaaaaaaataaataaaaaataaataaatata

SEQ ID NO: 12268 - RNA, 82 nt, synthetic construct
  source 1..82: mol_type = other RNA
aaatataaataaataaatataaataaaaaaaaaaaaaaaaaaaaaaaaaaaaaaaaaaataaataaaaaataaataaatata

SEQ ID NO: 12269 - RNA, 82 nt, synthetic construct
  source 1..82: mol_type = other RNA
aaataaatataaataaatataaaaaaaaaaaaaaaaaaaaaaaaaaaaaaaaaaaaaaaaaaataataaataaataaatata

SEQ ID NO: 12270 - RNA, 82 nt, synthetic construct
  source 1..82: mol_type = other RNA
aaataaatataaatataaataaaaaaaaaaaaaaaaaaaaaaaaaaaaaaaaaaaaaaaaaaataataaataaataaatata

SEQ ID NO: 12271 - RNA, 82 nt, synthetic construct
  source 1..82: mol_type = other RNA
aaataaatataaataaatataaaaaaaaaaaaaaaaaaaaaaaaaaaaaaaaaaaaaaataaataataaataaataaatata

SEQ ID NO: 12272 - RNA, 82 nt, synthetic construct
  source 1..82: mol_type = other RNA
aaataaatataaatataaataaaaaaaaaaaaaaaaaaaaaaaaaaaaaaaaaaaaaaataaataataaataaataaatata

SEQ ID NO: 12273 - RNA, 82 nt, synthetic construct
  source 1..82: mol_type = other RNA
aaataaatataaatataaataaataaaaaaaaaaaaaaaaaaaaaaaaaaaaaaaaaaaaaaataataaataaataaatata

SEQ ID NO: 12274 - RNA, 82 nt, synthetic construct
  source 1..82: mol_type = other RNA
aaataaatataaatataaataaataaaaaaaaaaaaaaaaaaaaaaaaaaaaaaaaaaataaataataaataaataaatata

SEQ ID NO: 12275 - RNA, 82 nt, synthetic construct
  source 1..82: mol_type = other RNA
aaataaatataaataaatataaataaaaaaaaaaaaaaaaaaaaaaaaaaaaaaaaaaataaataataaataaataaatata

SEQ ID NO: 12276 - RNA, 82 nt, synthetic construct
  source 1..82: mol_type = other RNA
aaatataaataaatataaataaataaaaaaaaaaaaaaaaaaaaaaaaaaaaaaaaaaataaataataaataaataaatata

SEQ ID NO: 12277 - RNA, 82 nt, synthetic construct
  source 1..82: mol_type = other RNA
aaataaatataaataaatataaaaaaaaaaaaaaaaaaaaaaaaaaaaaaaaaaaaaaaaatataaaaaaaaaaaaaatata

SEQ ID NO: 12278 - RNA, 82 nt, synthetic construct
  source 1..82: mol_type = other RNA
aaataaatataaatataaataaaaaaaaaaaaaaaaaaaaaaaaaaaaaaaaaaaaaaaaatataaaaaaaaaaaaaatata

SEQ ID NO: 12279 - RNA, 82 nt, synthetic construct
  source 1..82: mol_type = other RNA
aaataaatataaataaatataaaaaaaaaaaaaaaaaaaaaaaaaaaaaaaaaaaaaaaaaaatataaaaaaaaaaaatata

SEQ ID NO: 12280 - RNA, 82 nt, synthetic construct
  source 1..82: mol_type = other RNA
aaatataaataaataaatataaaaaaaaaaaaaaaaaaaaaaaaaaaaaaaaaaaaaaataaatataaaaaaaaaaaatata

SEQ ID NO: 12281 - RNA, 82 nt, synthetic construct
  source 1..82: mol_type = other RNA
aaataaatataaataaatataaaaaaaaaaaaaaaaaaaaaaaaaaaaaaaaaaaaaaaaaaatataaataaaaaaaatata

SEQ ID NO: 12282 - RNA, 82 nt, synthetic construct
  source 1..82: mol_type = other RNA
aaataaatataaataaatataaaaaaaaaaaaaaaaaaaaaaaaaaaaaaaaaaaaaaaaaaatataaaaaaaataaatata

SEQ ID NO: 12283 - RNA, 82 nt, synthetic construct
  source 1..82: mol_type = other RNA
aaataaatataaatataaataaataaaaaaaaaaaaaaaaaaaaaaaaaaaaaaaaaaaaatataaaaaaaaaaaaaatata

SEQ ID NO: 12284 - RNA, 82 nt, synthetic construct
  source 1..82: mol_type = other RNA
aaataaatataaataaatataaaaaaaaaaaaaaaaaaaaaaaaaaaaaaaaaaaaaaaaatataaaaaaaaaataaatata

SEQ ID NO: 12285 - RNA, 82 nt, synthetic construct
  source 1..82: mol_type = other RNA
aaataaatataaataaatataaaaaaaaaaaaaaaaaaaaaaaaaaaaaaaaaaaaaaaaatataaaaaataaataaatata

SEQ ID NO: 12286 - RNA, 82 nt, synthetic construct
  source 1..82: mol_type = other RNA
aaataaatataaataaatataaaaaaaaaaaaaaaaaaaaaaaaaaaaaaaaaaaaaaaaaaatataaaataaataaatata

SEQ ID NO: 12287 - RNA, 82 nt, synthetic construct
  source 1..82: mol_type = other RNA
aaataaatataaatataaataaaaaaaaaaaaaaaaaaaaaaaaaaaaaaaaaaaaaaaaaaatataaaataaataaatata

SEQ ID NO: 12288 - RNA, 82 nt, synthetic construct
  source 1..82: mol_type = other RNA
aaataaatataaataaatataaaaaaaaaaaaaaaaaaaaaaaaaaaaaaaaaaaaaaataaatataaataaaaaaaatata

SEQ ID NO: 12289 - RNA, 82 nt, synthetic construct
  source 1..82: mol_type = other RNA
aaataaatataaataaatataaaaaaaaaaaaaaaaaaaaaaaaaaaaaaaaaaaaaaaaaaatataaataaaataaatata

SEQ ID NO: 12290 - RNA, 82 nt, synthetic construct
  source 1..82: mol_type = other RNA
aaataaatataaataaatataaaaaaaaaaaaaaaaaaaaaaaaaaaaaaaaaaaaaaataaatataaaaaaaataaatata

SEQ ID NO: 12291 - RNA, 82 nt, synthetic construct
  source 1..82: mol_type = other RNA
aaataaatataaatataaataaaaaaaaaaaaaaaaaaaaaaaaaaaaaaaaaaaaaaaaatataaaaaataaataaatata

SEQ ID NO: 12292 - RNA, 82 nt, synthetic construct
  source 1..82: mol_type = other RNA
aaatataaataaataaatataaaaaaaaaaaaaaaaaaaaaaaaaaaaaaaaaaaaaaaaatataaaaaataaataaatata

SEQ ID NO: 12293 - RNA, 82 nt, synthetic construct
  source 1..82: mol_type = other RNA
aaataaatataaatataaatataaaaaaaaaaaaaaaaaaaaaaaaaaaaaaaaaaaaaaaaataaaaaataaataaatata

SEQ ID NO: 12294 - RNA, 82 nt, synthetic construct
  source 1..82: mol_type = other RNA
aaataaatataaatataaataaaaaaaaaaaaaaaaaaaaaaaaaaaaaaaaaaaaaaaaaaatataaataaaataaatata

SEQ ID NO: 12295 - RNA, 82 nt, synthetic construct
  source 1..82: mol_type = other RNA
aaataaatataaatataaataaaaaaaaaaaaaaaaaaaaaaaaaaaaaaaaaaaaaaataaatataaaaaaaataaatata

SEQ ID NO: 12296 - RNA, 82 nt, synthetic construct
  source 1..82: mol_type = other RNA
aaataaatataaataaatataaataaaaaaaaaaaaaaaaaaaaaaaaaaaaaaaaaaaaatataaaaaaaaaataaatata

SEQ ID NO: 12297 - RNA, 82 nt, synthetic construct
  source 1..82: mol_type = other RNA
aaataaatataaatataaataaataaaaaaaaaaaaaaaaaaaaaaaaaaaaaaaaaaaaaaatataaaaaaaataaatata

SEQ ID NO: 12298 - RNA, 82 nt, synthetic construct
  source 1..82: mol_type = other RNA
aaataaatataaataaatataaataaaaaaaaaaaaaaaaaaaaaaaaaaaaaaaaaaaaaaatataaaaaaaataaatata

SEQ ID NO: 12299 - RNA, 82 nt, synthetic construct
  source 1..82: mol_type = other RNA
aaataaatataaataaatataaaaaaaaaaaaaaaaaaaaaaaaaaaaaaaaaaaaaaataaatataaaataaataaatata

SEQ ID NO: 12300 - RNA, 82 nt, synthetic construct
  source 1..82: mol_type = other RNA
aaataaatataaatataaataaaaaaaaaaaaaaaaaaaaaaaaaaaaaaaaaaaaaaataaatataaaataaataaatata

SEQ ID NO: 12301 - RNA, 82 nt, synthetic construct
  source 1..82: mol_type = other RNA
aaataaatataaatataaataaataaaaaaaaaaaaaaaaaaaaaaaaaaaaaaaaaaaaaaatataaaataaataaatata

SEQ ID NO: 12302 - RNA, 82 nt, synthetic construct
  source 1..82: mol_type = other RNA
aaataaatataaataaatataaaaaaaaaaaaaaaaaaaaaaaaaaaaaaaaaaaaaaataaatataaataaaataaatata

SEQ ID NO: 12303 - RNA, 82 nt, synthetic construct
  source 1..82: mol_type = other RNA
aaatataaataaataaatataaaaaaaaaaaaaaaaaaaaaaaaaaaaaaaaaaaaaaataaatataaaataaataaatata

SEQ ID NO: 12304 - RNA, 82 nt, synthetic construct
  source 1..82: mol_type = other RNA
aaataaatataaataaatataaataaaaaaaaaaaaaaaaaaaaaaaaaaaaaaaaaaaaaaatataaataaaataaatata

SEQ ID NO: 12305 - RNA, 82 nt, synthetic construct
  source 1..82: mol_type = other RNA
aaataaatataaatataaataaaaaaaaaaaaaaaaaaaaaaaaaaaaaaaaaaaaaaataaatataaataaaataaatata

SEQ ID NO: 12306 - RNA, 82 nt, synthetic construct
  source 1..82: mol_type = other RNA
aaatataaataaataaatataaataaaaaaaaaaaaaaaaaaaaaaaaaaaaaaaaaaaaaaatataaaataaataaatata

SEQ ID NO: 12307 - RNA, 82 nt, synthetic construct
  source 1..82: mol_type = other RNA
aaataaatataaataaatataaataaaaaaaaaaaaaaaaaaaaaaaaaaaaaaaaaaaaaaatataaaataaataaatata

SEQ ID NO: 12308 - RNA, 82 nt, synthetic construct
  source 1..82: mol_type = other RNA
aaataaatataaatataaataaataaaaaaaaaaaaaaaaaaaaaaaaaaaaaaaaaaaaatataaaaaataaataaatata

SEQ ID NO: 12309 - RNA, 82 nt, synthetic construct
  source 1..82: mol_type = other RNA
aaataaatataaataaatataaataaaaaaaaaaaaaaaaaaaaaaaaaaaaaaaaaaaaatataaaaaataaataaatata

SEQ ID NO: 12310 - RNA, 82 nt, synthetic construct
  source 1..82: mol_type = other RNA
aaataaatataaatataaatataaaaaaaaaaaaaaaaaaaaaaaaaaaaaaaaaaaaataaataaaaaataaataaatata

SEQ ID NO: 12311 - RNA, 82 nt, synthetic construct
  source 1..82: mol_type = other RNA
aaataaatataaatataaataaataaaaaaaaaaaaaaaaaaaaaaaaaaaaaaaaaaataaatataaaataaataaatata

SEQ ID NO: 12312 - RNA, 82 nt, synthetic construct
  source 1..82: mol_type = other RNA
aaataaatataaataaatataaataaaaaaaaaaaaaaaaaaaaaaaaaaaaaaaaaaataaatataaaataaataaatata

SEQ ID NO: 12313 - RNA, 82 nt, synthetic construct
  source 1..82: mol_type = other RNA
aaataaatataaataaatataaataaaaaaaaaaaaaaaaaaaaaaaaaaaaaaaaaaataaatataaataaaataaatata

SEQ ID NO: 12314 - RNA, 82 nt, synthetic construct
  source 1..82: mol_type = other RNA
aaatataaataaatataaataaataaaaaaaaaaaaaaaaaaaaaaaaaaaaaaaaaaataaatataaaataaataaatata

SEQ ID NO: 12315 - RNA, 82 nt, synthetic construct
  source 1..82: mol_type = other RNA
aaataaatataaatataaataaataaaaaaaaaaaaaaaaaaaaaaaaaaaaaaaaaaataaatataaataaaataaatata

SEQ ID NO: 12316 - RNA, 82 nt, synthetic construct
  source 1..82: mol_type = other RNA
aaatataaataaataaatataaataaaaaaaaaaaaaaaaaaaaaaaaaaaaaaaaaaataaatataaaataaataaatata

SEQ ID NO: 12317 - RNA, 82 nt, synthetic construct
  source 1..82: mol_type = other RNA
aaataaatataaataaatataaaaaaaaaaaaaaaaaaaaaaaaaaaaaaaaaaaaaaaaaaataaaaaaaaaaaatatata

SEQ ID NO: 12318 - RNA, 82 nt, synthetic construct
  source 1..82: mol_type = other RNA
aaataaatataaatataaataaaaaaaaaaaaaaaaaaaaaaaaaaaaaaaaaaaaaaaaaaataaaaaaaaaaaatatata

SEQ ID NO: 12319 - RNA, 82 nt, synthetic construct
  source 1..82: mol_type = other RNA
aaatataaataaataaatataaaaaaaaaaaaaaaaaaaaaaaaaaaaaaaaaaaaaaaaaaataaaaaaaaaaaatatata

SEQ ID NO: 12320 - RNA, 82 nt, synthetic construct
  source 1..82: mol_type = other RNA
aaataaatataaataaatataaaaaaaaaaaaaaaaaaaaaaaaaaaaaaaaaaaaaaataaataaaaaaaaaaaatatata

SEQ ID NO: 12321 - RNA, 82 nt, synthetic construct
  source 1..82: mol_type = other RNA
aaataaatataaatataaataaaaaaaaaaaaaaaaaaaaaaaaaaaaaaaaaaaaaaataaataaaaaaaaaaaatatata

SEQ ID NO: 12322 - RNA, 82 nt, synthetic construct
  source 1..82: mol_type = other RNA
aaataaatataaataaatataaataaaaaaaaaaaaaaaaaaaaaaaaaaaaaaaaaaaaaaataaaaaaaaaaaatatata

SEQ ID NO: 12323 - RNA, 82 nt, synthetic construct
  source 1..82: mol_type = other RNA
aaataaatataaatataaataaataaaaaaaaaaaaaaaaaaaaaaaaaaaaaaaaaaaaaaataaaaaaaaaaaatatata

SEQ ID NO: 12324 - RNA, 82 nt, synthetic construct
  source 1..82: mol_type = other RNA
aaataaatataaataaatataaaaaaaaaaaaaaaaaaaaaaaaaaaaaaaaaaaaaaaaaaataaaaaaaataaatatata

SEQ ID NO: 12325 - RNA, 82 nt, synthetic construct
  source 1..82: mol_type = other RNA
aaataaatataaatataaataaataaaaaaaaaaaaaaaaaaaaaaaaaaaaaaaaaaataaataaaaaaaaaaaatatata

SEQ ID NO: 12326 - RNA, 82 nt, synthetic construct
  source 1..82: mol_type = other RNA
aaataaatataaataaatataaataaaaaaaaaaaaaaaaaaaaaaaaaaaaaaaaaaataaataaaaaaaaaaaatatata

SEQ ID NO: 12327 - RNA, 82 nt, synthetic construct
  source 1..82: mol_type = other RNA
aaataaatataaatataaataaaaaaaaaaaaaaaaaaaaaaaaaaaaaaaaaaaaaaataaataaaaaaaataaatatata

SEQ ID NO: 12328 - RNA, 82 nt, synthetic construct
  source 1..82: mol_type = other RNA
aaataaatataaataaatatataaaaaaaaaaaaaaaaaaaaaaaaaaaaaaaaaaaaataaataaaaaataaataaatata

SEQ ID NO: 12329 - RNA, 82 nt, synthetic construct
  source 1..82: mol_type = other RNA
aaataaatataaataaatataaaaaaaaaaaaaaaaaaaaaaaaaaaaaaaaaaaaaaaaaaataaaaaataaataaataaa

SEQ ID NO: 12330 - RNA, 82 nt, synthetic construct
  source 1..82: mol_type = other RNA
aaataaatataaatataaataaaaaaaaaaaaaaaaaaaaaaaaaaaaaaaaaaaaaaataaataaaaaaaaaataaataaa

SEQ ID NO: 12331 - RNA, 82 nt, synthetic construct
  source 1..82: mol_type = other RNA
aaataaatataaataaatataaaaaaaaaaaaaaaaaaaaaaaaaaaaaaaaaaaaaaataaataaaaaataaataaataaa

SEQ ID NO: 12332 - RNA, 82 nt, synthetic construct
  source 1..82: mol_type = other RNA
aaataaatataaatataaataaaaaaaaaaaaaaaaaaaaaaaaaaaaaaaaaaaaaaataaataaaaaataaataaataaa

SEQ ID NO: 12333 - RNA, 82 nt, synthetic construct
  source 1..82: mol_type = other RNA
aaataaatataaatataaataaataaaaaaaaaaaaaaaaaaaaaaaaaaaaaaaaaaaaaaataaaaaataaataaataaa

SEQ ID NO: 12334 - RNA, 82 nt, synthetic construct
  source 1..82: mol_type = other RNA
aaataaatataaataaatataaataaaaaaaaaaaaaaaaaaaaaaaaaaaaaaaaaaataaataaaaaataaataaataaa

SEQ ID NO: 12335 - RNA, 82 nt, synthetic construct
  source 1..82: mol_type = other RNA
aaataaatataaatataaataaataaaaaaaaaaaaaaaaaaaaaaaaaaaaaaaaaaataaataaaaaataaataaataaa

SEQ ID NO: 12336 - RNA, 83 nt, synthetic construct
  source 1..83: mol_type = other RNA
aaaaaaaaaaaaaaaaaaaaaaaaaaaaaataaataaataaataaataaataaaaaaaaaaaaaaaaaaaaaatataaatata

SEQ ID NO: 12337 - RNA, 83 nt, synthetic construct
  source 1..83: mol_type = other RNA
aaaaaaaaaaaaaaaaaaaaaaaaaaaaaataaataaataaataaataaataaaaaaaaaaaaaaaaaataaatataaatata

SEQ ID NO: 12338 - RNA, 83 nt, synthetic construct
  source 1..83: mol_type = other RNA
aaaaaaaaaaaaaaaaaaaaaaaaaaaaaataaataaataaataaataaataaataaaaaaaaaaaaaaaaaatataaatata

SEQ ID NO: 12339 - RNA, 83 nt, synthetic construct
  source 1..83: mol_type = other RNA
aaaaaaaaaaaaaaaaaaaaaaaaaataaataaataaataaataaataaataaaaaaaaaaaaaaaaaaaaaatataaatata

SEQ ID NO: 12340 - RNA, 83 nt, synthetic construct
  source 1..83: mol_type = other RNA
aaaaaaaaaaaaaaaaaaaaaaaaaaaaaataaataaataaataaataaataaataaaaaaaaaaaaaataaatataaatata

SEQ ID NO: 12341 - RNA, 83 nt, synthetic construct
  source 1..83: mol_type = other RNA
aaaaaaaaaaaaaaaaaaaaaaaaaaaaaaaaaaaaaaaaaaaaaaaaaaaaaaatataaataaatataaaaaaaaaaatata

SEQ ID NO: 12342 - RNA, 83 nt, synthetic construct
  source 1..83: mol_type = other RNA
aaaaaaaaaaaaaaaaaaaaaaaaaaaatataaataaataaataaataaataaaaaaaaaaaaaaaaaaaaaatataaatata

SEQ ID NO: 12343 - RNA, 83 nt, synthetic construct
  source 1..83: mol_type = other RNA
aaaaaaaaaaaaaaaaaaaaaaaaaaaatataaataaataaataaataaataaaaaaaaaaaaaaaaaataaatataaatata

SEQ ID NO: 12344 - RNA, 83 nt, synthetic construct
  source 1..83: mol_type = other RNA
aaaaaaaaaaaaaaaaaaaaaaaataaatataaataaataaataaataaataaaaaaaaaaaaaaaaaaaaaatataaatata

SEQ ID NO: 12345 - RNA, 83 nt, synthetic construct
  source 1..83: mol_type = other RNA
aaaaaaaaaaaaaaaaaaaaaaaaaaaatataaataaataaataaataaataaataaaaaaaaaaaaaaaaaatataaatata

SEQ ID NO: 12346 - RNA, 83 nt, synthetic construct
  source 1..83: mol_type = other RNA
aaaaaaaaaaaaaaaaaaaaaaaataaatataaataaataaataaataaataaaaaaaaaaaaaaaaaataaatataaatata

SEQ ID NO: 12347 - RNA, 83 nt, synthetic construct
  source 1..83: mol_type = other RNA
aaaaaaaaaaaaaaaaaaaaaaaaaaaatataaataaataaataaataaataaataaaaaaaaaaaaaataaatataaatata

SEQ ID NO: 12348 - RNA, 83 nt, synthetic construct
  source 1..83: mol_type = other RNA
aaaaaaaaaaaaaaaaaaaaaaaaaaaaaataaataaataaataaataaataaatataaaaaaaaaaaataaatataaatata

SEQ ID NO: 12349 - RNA, 83 nt, synthetic construct
  source 1..83: mol_type = other RNA
aaaaaaaaaaaaaaaaaaaaaaaataaatataaataaataaataaataaataaataaaaaaaaaaaaaataaatataaatata

SEQ ID NO: 12350 - RNA, 83 nt, synthetic construct
  source 1..83: mol_type = other RNA
aaaaaaaaaaaaaaaaaaaaaaaaaaaaaataaataaataaataaataaataaatataaataaaaaaaataaatataaatata

SEQ ID NO: 12351 - RNA, 83 nt, synthetic construct
  source 1..83: mol_type = other RNA
aaaaaaaaaaaaaaaaaaaaaaaaaaaaaataaataaataaataaatataaataaataaataaaaaaaataaatataaatata

SEQ ID NO: 12352 - RNA, 83 nt, synthetic construct
  source 1..83: mol_type = other RNA
aaaaaaaaaaaaaaaaataaaaaaaaaaaaaaaaaaaaaaaaaaaaaaaaaaaaaaaaaaaataaataaatataaataaataa

SEQ ID NO: 12353 - RNA, 83 nt, synthetic construct
  source 1..83: mol_type = other RNA
aaaaaaaaaaaaataaataaaaaaaaaaaaaaaaaaaaaaaaaaaaaaaaaaaaaaaaaaaataaataaatataaataaataa

SEQ ID NO: 12354 - RNA, 83 nt, synthetic construct
  source 1..83: mol_type = other RNA
aaaaaaaaaaaaaaaaataaataaaaaaaaaaaaaaaaaaaaaaaaaaaaaaaaaaaaaaaataaataaatataaataaataa

SEQ ID NO: 12355 - RNA, 83 nt, synthetic construct
  source 1..83: mol_type = other RNA
aaaaaaaaaaaaaaaaataaaaaaaaaaaaaaaaaaaaaaaaaaaaaaaaaaaaaaaataaataaataaatataaataaataa

SEQ ID NO: 12356 - RNA, 83 nt, synthetic construct
  source 1..83: mol_type = other RNA
aaaaaaaaaaaaataaataaataaaaaaaaaaaaaaaaaaaaaaaaaaaaaaaaaaaaaaaataaataaatataaataaataa

SEQ ID NO: 12357 - RNA, 83 nt, synthetic construct
  source 1..83: mol_type = other RNA
aaaaaaaaaaaaaaaaataaataaaaaaaaaaaaaaaaaaaaaaaaaaaaaaaaaaaataaataaataaatataaataaataa

SEQ ID NO: 12358 - RNA, 83 nt, synthetic construct
  source 1..83: mol_type = other RNA
aaaaaaaaaaaaataaataaaaaaaaaaaaaaaaaaaaaaaaaaaaaaaaaaaaaaaataaataaataaatataaataaataa

SEQ ID NO: 12359 - RNA, 83 nt, synthetic construct
  source 1..83: mol_type = other RNA
aaaaaaaaaaaaataaataaataaaaaaaaaaaaaaaaaaaaaaaaaaaaaaaaaaaataaataaataaatataaataaataa

SEQ ID NO: 12360 - RNA, 83 nt, synthetic construct
  source 1..83: mol_type = other RNA
aaaaaaaaaaaaaaaaataaataaaaaaaaaaaaaaaaaaaaaaaaaaaaaaaaaaaaaaaataaataaatataaataaatat

SEQ ID NO: 12361 - RNA, 83 nt, synthetic construct
  source 1..83: mol_type = other RNA
aaaaaaaaaaaaataaataaataaaaaaaaaaaaaaaaaaaaaaaaaaaaaaaaaaaaaaaataaataaatataaataaatat

SEQ ID NO: 12362 - RNA, 83 nt, synthetic construct
  source 1..83: mol_type = other RNA
aaaaaaaaaaaaataaataaataaaaaaaaaaaaaaaaaaaaaaaaaaaaaaaaaaaataaataaataaatataaataaatat

SEQ ID NO: 12363 - RNA, 83 nt, synthetic construct
  source 1..83: mol_type = other RNA
aaaaaaaaaaaaaaaaaaaaaaaaaaaaaaaaataaataaataaaaaaaataaaaaaaaaaaaaaaaaaaataaataaatata

SEQ ID NO: 12364 - RNA, 83 nt, synthetic construct
  source 1..83: mol_type = other RNA
aaaaaaaaaaaaaaaaaaaaaaaaaaaaataaataaataaataaaaaaaataaaaaaaaaaaaaaaaaaaataaataaatata

SEQ ID NO: 12365 - RNA, 83 nt, synthetic construct
  source 1..83: mol_type = other RNA
aaaaaaaaaaaaaaaaaaaaaaaaaaaaaaaaataaataaataaataaaataaaaaaaaaaaaaaaaaaaataaataaatata

SEQ ID NO: 12366 - RNA, 83 nt, synthetic construct
  source 1..83: mol_type = other RNA
aaaaaaaaaaaaaaaaaaaaaaataaataaataaataaataaaaaaaaaaaataaataaataaaaaaaaaaaaaataaatata

SEQ ID NO: 12367 - RNA, 83 nt, synthetic construct
  source 1..83: mol_type = other RNA
aaaaaaaaaaaaaaaaaaaaaaataaataaataaataaataaaaaaaataaataaataaataaaaaaaaaaaaaataaatata

SEQ ID NO: 12368 - RNA, 83 nt, synthetic construct
  source 1..83: mol_type = other RNA
aaaaaaaaaaaaaaaaaaaaaaataaataaataaataaataaaaaaaaaaaataaataaataaaaaaaaaataaataaatata

SEQ ID NO: 12369 - RNA, 83 nt, synthetic construct
  source 1..83: mol_type = other RNA
aaaaaaaaaaaaaaaaaaaaaaataaataaataaataaataaaaaaaataaataaataaataaataaaaaaaaaataaatata

SEQ ID NO: 12370 - RNA, 83 nt, synthetic construct
  source 1..83: mol_type = other RNA
aaaaaaaaaaaaaaaaaaaaaaataaataaataaataaataaataaaataaataaataaataaataaaaaaaaaataaatata

SEQ ID NO: 12371 - RNA, 83 nt, synthetic construct
  source 1..83: mol_type = other RNA
aaaaaaaaaaaaaaaaaaaaaaataaataaataaataaataaaaaaaataaataaataaataaataaataaaaaataaatata

SEQ ID NO: 12372 - RNA, 83 nt, synthetic construct
  source 1..83: mol_type = other RNA
aaaaaaaaaaaaaaaaaaaaaaaaaaaaaaataaataaaaaaaaatataaataaatataaataaatataaataaataaatata

SEQ ID NO: 12373 - RNA, 83 nt, synthetic construct
  source 1..83: mol_type = other RNA
aaaaaaaaaaaaaaaaaaaaaaaaaaaatataaataaataaataaataaataaatataaataaaaaaaaaaaatataaatata

SEQ ID NO: 12374 - RNA, 83 nt, synthetic construct
  source 1..83: mol_type = other RNA
aaaaaaaaaaaaaaaaaaaaaaaaaaaatataaataaataaataaataaataaatataaaaaaaaaaaataaatataaatata

SEQ ID NO: 12375 - RNA, 83 nt, synthetic construct
  source 1..83: mol_type = other RNA
aaaaaaaaaaaaaaaaaaaaaaaaaaaatataaataaataaataaataaataaatataaataaaaaaaataaatataaatata

SEQ ID NO: 12376 - RNA, 83 nt, synthetic construct
  source 1..83: mol_type = other RNA
aaaaaaaaaaaaaaaaaaaaaaaaaaaatataaataaataaataaataaatataaataaataaaaaaaataaatataaatata

SEQ ID NO: 12377 - RNA, 83 nt, synthetic construct
  source 1..83: mol_type = other RNA
aaaaaaaaaaaaaaaaaaaaaaaataaatataaataaataaataaataaataaatataaaaaaaaaaaataaatataaatata

SEQ ID NO: 12378 - RNA, 83 nt, synthetic construct
  source 1..83: mol_type = other RNA
aaaaaaaaaaaaaaaaaaaaaaaataaatataaataaataaataaataaataaatataaataaaaaaaaaaaatataaatata

SEQ ID NO: 12379 - RNA, 83 nt, synthetic construct
  source 1..83: mol_type = other RNA
aaaaaaaaaaaaaaaaaaaaaaaataaatataaataaataaataaatataaataaataaataaaaaaaataaatataaatata

SEQ ID NO: 12380 - RNA, 83 nt, synthetic construct
  source 1..83: mol_type = other RNA
aaaaaaaaaaaaaaaaaaaaaaaataaatataaataaataaataaataaataaatataaataaaaaaaataaatataaatata

SEQ ID NO: 12381 - RNA, 83 nt, synthetic construct
  source 1..83: mol_type = other RNA
aaaaaaaaaaaaaaaaaaaaaaaataaatataaataaataaataaataaatataaataaataaaaaaaataaatataaatata

SEQ ID NO: 12382 - RNA, 83 nt, synthetic construct
  source 1..83: mol_type = other RNA
aaatataaataaataaaaaaaaaaaaaaaaaaaaaaataaatataaataaataaaaaaaaaaaaaaaaaaaaaaataaatata

SEQ ID NO: 12383 - RNA, 83 nt, synthetic construct
  source 1..83: mol_type = other RNA
aaatataaataaataaaaaaaaaaaaaaaaaaaaaaataaatataaataaataaataaaaaaaaaaaaaaaaaaataaatata

SEQ ID NO: 12384 - RNA, 83 nt, synthetic construct
  source 1..83: mol_type = other RNA
aaatataaataaataaaaaaaaaaaaaaaaaaaaaaataaatataaataaataaataaataaaaaaaaaaaaaaataaatata

SEQ ID NO: 12385 - RNA, 83 nt, synthetic construct
  source 1..83: mol_type = other RNA
aaatataaataaataaaaaaaaaaaaaaaaaaataaataaatataaataaataaataaaaaaaaaaaaaaaaaaataaatata

SEQ ID NO: 12386 - RNA, 83 nt, synthetic construct
  source 1..83: mol_type = other RNA
aaatataaataaataaataaaaaaaaaaaaaaaaaaataaatataaataaataaataaaaaaaaaaaaaaaaaaataaatata

SEQ ID NO: 12387 - RNA, 83 nt, synthetic construct
  source 1..83: mol_type = other RNA
aaaaaaaaaaaaaaaaaaaaaaaaaaaaaataaatatataaataaataaataaaaaaaaaaaaaaaaaaaaaatataaatata

SEQ ID NO: 12388 - RNA, 83 nt, synthetic construct
  source 1..83: mol_type = other RNA
aaaaaaaaaaaaaaaaaaaaaaaaaaaaaatatataaataaataaataaataaaaaaaaaaaaaaaaaaaaaatataaatata

SEQ ID NO: 12389 - RNA, 83 nt, synthetic construct
  source 1..83: mol_type = other RNA
aaaaaaaaaaaaaaaaataaaaaaaaaaaaaaaaaaaaaaaaaaaaaaaaaaaaaaaaaatataaataaatataaataaataa

SEQ ID NO: 12390 - RNA, 83 nt, synthetic construct
  source 1..83: mol_type = other RNA
aaaaaaaaaaaaaaaaatataaaaaaaaaaaaaaaaaaaaaaaaaaaaaaaaaaaaaaaaaataaataaatataaataaataa

SEQ ID NO: 12391 - RNA, 83 nt, synthetic construct
  source 1..83: mol_type = other RNA
aaatataaataaataaaaaaaaaaaaaaaaaaataaataaatataaataaataaataaataaaaaaaaaaaaaaataaatata

SEQ ID NO: 12392 - RNA, 83 nt, synthetic construct
  source 1..83: mol_type = other RNA
aaaaaaaaaaaaaaaaaaaaataaataaatataaataaaaaaaaaaaaaaaaaaaaaaaaaaaaaaaaaataaatataaataa

SEQ ID NO: 12393 - RNA, 83 nt, synthetic construct
  source 1..83: mol_type = other RNA
aaaaaaaaaaaaaaaaataaataaaaaaaaaaaaaaaaaaaaaaaaaaaaaaaaaaaaaatataaataaatataaataaataa

SEQ ID NO: 12394 - RNA, 83 nt, synthetic construct
  source 1..83: mol_type = other RNA
aaaaaaaaaaaaaaaaaaaaataaataaatataaataaataaaaaaaaaaaaaaaaaaaaaaaaaaaaaataaatataaataa

SEQ ID NO: 12395 - RNA, 83 nt, synthetic construct
  source 1..83: mol_type = other RNA
aaaaaaaaaaaaaaaaaaaaataaataaatataaataaaaaaaaaaaaaaaaaaaaaaaaaaaaaataaataaatataaataa

SEQ ID NO: 12396 - RNA, 83 nt, synthetic construct
  source 1..83: mol_type = other RNA
aaaaaaaaaaaaataaataaataaaaaaaaaaaaaaaaaaaaaaaaaaaaaaaaaaaaaatataaataaatataaataaataa

SEQ ID NO: 12397 - RNA, 83 nt, synthetic construct
  source 1..83: mol_type = other RNA
aaaaaaaaaaaaaaaaaaaaataaataaatataaataaataaaaaaaaaaaaaaaaaaaaaaaaaataaataaatataaataa

SEQ ID NO: 12398 - RNA, 83 nt, synthetic construct
  source 1..83: mol_type = other RNA
aaaaaaaaaaaaaataaataaataaataaaaaaaaaaaaaaaaaaaaaaaaaaaaataaatataaatataaataaataaataa

SEQ ID NO: 12399 - RNA, 83 nt, synthetic construct
  source 1..83: mol_type = other RNA
aaaaaaaaaaaaaataaataaataaataaaaaaaaaaaaaaaaaaaaaaaaaaaaataaatataaataaatataaataaataa

SEQ ID NO: 12400 - RNA, 83 nt, synthetic construct
  source 1..83: mol_type = other RNA
aaaaaaaaaataaataaataaataaataaaaaaaaaaaaaaaaaaaaaaaaaaaaataaatataaatataaataaataaataa

SEQ ID NO: 12401 - RNA, 83 nt, synthetic construct
  source 1..83: mol_type = other RNA
aaaaaaaaaataaataaataaataaataaaaaaaaaaaaaaaaaaaaaaaaaaaaataaatataaataaatataaataaataa

SEQ ID NO: 12402 - RNA, 83 nt, synthetic construct
  source 1..83: mol_type = other RNA
aaaaaataaataaataaataaataaataaaaaaaaaaaaaaaaaaaaaaaaaaaaataaatataaatataaataaataaataa

SEQ ID NO: 12403 - RNA, 83 nt, synthetic construct
  source 1..83: mol_type = other RNA
aaaaaaaaaataaataaataaataaataaataaaaaaaaaaaaaaaaaaaaaaaaataaatataaatataaataaataaataa

SEQ ID NO: 12404 - RNA, 83 nt, synthetic construct
  source 1..83: mol_type = other RNA
aaaaaaaaaataaataaataaataaataaataaaaaaaaaaaaaaaaaaaaaaaaataaatataaataaatataaataaataa

SEQ ID NO: 12405 - RNA, 83 nt, synthetic construct
  source 1..83: mol_type = other RNA
aaaaaaaaaaaaaaaaaaaaataaataaatataaataaaaaaaaaaaaaaaaaaaaaaaaaaaaaaaaaataaatataaatat

SEQ ID NO: 12406 - RNA, 83 nt, synthetic construct
  source 1..83: mol_type = other RNA
aaaaaaaaaaaaaaaaaaaaataaataaatataaataaataaaaaaaaaaaaaaaaaaaaaaaaaaaaaataaatataaatat

SEQ ID NO: 12407 - RNA, 83 nt, synthetic construct
  source 1..83: mol_type = other RNA
aaaaaaaaaaaaaaaaaaaaataaataaatataaataaaaaaaaaaaaaaaaaaaaaaaaaaaaaataaataaatataaatat

SEQ ID NO: 12408 - RNA, 83 nt, synthetic construct
  source 1..83: mol_type = other RNA
aataaataaataaataaataaaataaaaaaaaaaaaaaaaaaaaaaaaaaaaaaaaaaaaaaaaaaaaaaaaaaaaaaatata

SEQ ID NO: 12409 - RNA, 83 nt, synthetic construct
  source 1..83: mol_type = other RNA
aaaaaaaaaaaaaaaaaaaaataaataaatataaataaataaaaaaaaaaaaaaaaaaaaaaaaaataaataaatataaatat

SEQ ID NO: 12410 - RNA, 83 nt, synthetic construct
  source 1..83: mol_type = other RNA
aaaaaaaaaaaataaaaaaaaaaaaaaaaaaaataaatataaataaaaaaaaaaaaaaaaaaaaaaaaaaaaaaaaaaatata

SEQ ID NO: 12411 - RNA, 83 nt, synthetic construct
  source 1..83: mol_type = other RNA
aaaaaaaaaaaataaaaaaaaaaaaaaaaaaaataaatataaataaaaaaaaaaaaaaaaaaaaaaaaaaaaaaataaatata

SEQ ID NO: 12412 - RNA, 83 nt, synthetic construct
  source 1..83: mol_type = other RNA
aaaaaaaataaataaaaaaaaaaaaaaaaaaaataaatataaataaaaaaaaaaaaaaaaaaaaaaaaaaaaaaaaaaatata

SEQ ID NO: 12413 - RNA, 83 nt, synthetic construct
  source 1..83: mol_type = other RNA
aaaaaaaaaaaataaaaaaaaaaaaaaaataaataaatataaataaaaaaaaaaaaaaaaaaaaaaaaaaaaaaaaaaatata

SEQ ID NO: 12414 - RNA, 83 nt, synthetic construct
  source 1..83: mol_type = other RNA
aaaaaaaaaaaaaaaaaaaaaaaaaaaaaataaataaataaataaataaataaaaaaaaaaaaaaaaaaaaaatatatatata

SEQ ID NO: 12415 - RNA, 83 nt, synthetic construct
  source 1..83: mol_type = other RNA
aaaaaaaaaaaaaaaaaaaaaaaaaaaaaaaaataaataaataaaaaatataaaaaaaaaaaaaaaaaaaataaataaatata

SEQ ID NO: 12416 - RNA, 83 nt, synthetic construct
  source 1..83: mol_type = other RNA
aaaaaaaataaataaaaaaaaaaaaaaaaaaaataaatataaataaaaaaaaaaaaaaaaaaaaaaaaaaaaaaataaatata

SEQ ID NO: 12417 - RNA, 83 nt, synthetic construct
  source 1..83: mol_type = other RNA
aaaaaaaataaataaaaaaaaaaaaaaaataaataaatataaataaaaaaaaaaaaaaaaaaaaaaaaaaaaaaaaaaatata

SEQ ID NO: 12418 - RNA, 83 nt, synthetic construct
  source 1..83: mol_type = other RNA
aaaaaaaaaaaataaaaaaaaaaaaaaaataaataaatataaataaaaaaaaaaaaaaaaaaaaaaaaaaaaaaataaatata

SEQ ID NO: 12419 - RNA, 83 nt, synthetic construct
  source 1..83: mol_type = other RNA
aaaataaataaataaaaaaaaaaaaaaaaaaaataaatataaataaaaaaaaaaaaaaaaaaaaaaaaaaaaaaaaaaatata

SEQ ID NO: 12420 - RNA, 83 nt, synthetic construct
  source 1..83: mol_type = other RNA
aaaaaaaaaaaaaaaaaaaaaaaaaaaaaataaataaataaataaataaataaaaaaaaaaaaaaaaaataaatatatatata

SEQ ID NO: 12421 - RNA, 83 nt, synthetic construct
  source 1..83: mol_type = other RNA
aaaaaaaaaaaaaaaaaaaaaaaaaaaaaataaataaataaataaataaataaataaaaaaaaaaaaaaaaaatatatatata

SEQ ID NO: 12422 - RNA, 83 nt, synthetic construct
  source 1..83: mol_type = other RNA
aaaaaaaaaaaaaaaaaaaaaaaaaaaaaaaaataaataaataaaaaatataaaaaaaaaaaaaaaataaataaataaatata

SEQ ID NO: 12423 - RNA, 83 nt, synthetic construct
  source 1..83: mol_type = other RNA
aaaaaaaataaataaaaaaaaaaaaaaaataaataaatataaataaaaaaaaaaaaaaaaaaaaaaaaaaaaaaataaatata

SEQ ID NO: 12424 - RNA, 83 nt, synthetic construct
  source 1..83: mol_type = other RNA
aaaataaataaataaaaaaaaaaaaaaaaaaaataaatataaataaaaaaaaaaaaaaaaaaaaaaaaaaaaaaataaatata

SEQ ID NO: 12425 - RNA, 83 nt, synthetic construct
  source 1..83: mol_type = other RNA
aaaataaataaataaaaaaaaaaaaaaaataaataaatataaataaaaaaaaaaaaaaaaaaaaaaaaaaaaaaaaaaatata

SEQ ID NO: 12426 - RNA, 83 nt, synthetic construct
  source 1..83: mol_type = other RNA
aaaaaaaaaaaaaaaaaaaaaaaaaaaaaataaataaataaataaataaataaataaaaaaaaaaaaaataaatatatatata

SEQ ID NO: 12427 - RNA, 83 nt, synthetic construct
  source 1..83: mol_type = other RNA
aaaaaaaaaaaaaaaataaaaaaaaaaaaataaataaataaataaataaataaaaaaaaaaaaaaaaaaaaaatataaatata

SEQ ID NO: 12428 - RNA, 83 nt, synthetic construct
  source 1..83: mol_type = other RNA
aaaaaaaaaaaaaaaaaaaaaaaaaaaaaataaataaataaataaataaataaaaaaataaaaaaaaaaaaaatataaatata

SEQ ID NO: 12429 - RNA, 83 nt, synthetic construct
  source 1..83: mol_type = other RNA
aaaaaaaaaaaaaaaaaaaaaaaaaaaaaataaataaataaataaataaataaaaaaaaaaataaaaaaaaaatataaatata

SEQ ID NO: 12430 - RNA, 83 nt, synthetic construct
  source 1..83: mol_type = other RNA
aaaaaaaaaaaataaaaaaaaaaaaaaaaataaataaataaataaataaataaaaaaaaaaaaaaaaaaaaaatataaatata

SEQ ID NO: 12431 - RNA, 83 nt, synthetic construct
  source 1..83: mol_type = other RNA
aaaaaaaaaaaaaaaaaaaaaaataaaaaataaataaataaataaataaataaaaaaaaaaaaaaaaaaaaaatataaatata

SEQ ID NO: 12432 - RNA, 83 nt, synthetic construct
  source 1..83: mol_type = other RNA
aaaaaaaaaaaaaaaaaaaaaaaaaaaaaaaaataaataaataaaaaatataaaaaaaaaaaataaataaataaataaatata

SEQ ID NO: 12433 - RNA, 83 nt, synthetic construct
  source 1..83: mol_type = other RNA
aaaaaaaaaaaaaaaaaaaaaaaaaaaaaaaaataaataaataaaaaatataaataaaaaaaaaaaataaataaataaatata

SEQ ID NO: 12434 - RNA, 83 nt, synthetic construct
  source 1..83: mol_type = other RNA
aaaataaataaataaaaaaaaaaaaaaaataaataaatataaataaaaaaaaaaaaaaaaaaaaaaaaaaaaaaataaatata

SEQ ID NO: 12435 - RNA, 83 nt, synthetic construct
  source 1..83: mol_type = other RNA
aaaaataaataaataaaaaaaaaaaaaaaaaaaaaaataaatataaataaataaataaaaaaaaaaaaaaaaaaataaatata

SEQ ID NO: 12436 - RNA, 83 nt, synthetic construct
  source 1..83: mol_type = other RNA
aaaaaaaaaaaaaaaaaaaaaaaataaaaataaataaataaataaataaataaaaaaaaaaaaaaaaaataaatataaatata

SEQ ID NO: 12437 - RNA, 83 nt, synthetic construct
  source 1..83: mol_type = other RNA
aaaaaaaaaaaaaaaaaaaaaaaaaaaaaataaataaataaataaataaataaaaataaataaaaaaaaaaaatataaatata

SEQ ID NO: 12438 - RNA, 83 nt, synthetic construct
  source 1..83: mol_type = other RNA
aaaaaaaaaaaaaaaaaaaaaaaaaaaaaataaataaataaataaataaataaaaaaaaataaaaaaaataaatataaatata

SEQ ID NO: 12439 - RNA, 83 nt, synthetic construct
  source 1..83: mol_type = other RNA
aaaaaaaaaaaaaaaaaaaaaaataaataaataaataaataaaaaaaaaaaataaataaataaaaaaaaaaaatataaatata

SEQ ID NO: 12440 - RNA, 83 nt, synthetic construct
  source 1..83: mol_type = other RNA
aaaaaaaaaaaaaaaaaaaaaaaaaaaaaaaaataaataaataaaaaatataaaaaaaataaataaataaataaataaatata

SEQ ID NO: 12441 - RNA, 83 nt, synthetic construct
  source 1..83: mol_type = other RNA
aaaaaaaaaaaaaaaaaaaaaaaaaaaaaaaaataaataaataaaaaatataaataaaaaaaataaataaataaataaatata

SEQ ID NO: 12442 - RNA, 84 nt, synthetic construct
  source 1..84: mol_type = other RNA
aaaaataaaaaaaaaaaaaaaaaaaaaaaaaaaaaaaaaaaaaaaaaaaaaaaaaaaaaaaaaaaaaaaaaaaaaaaaaatata

SEQ ID NO: 12443 - RNA, 84 nt, synthetic construct
  source 1..84: mol_type = other RNA
aaaaataaaaaaaaaaaaaaaaaaaaaaaaaaaaaaaaaaaaaaaaaaaaaaaaaaaaaaaaaaaaaaaaaaaaaataaatata

SEQ ID NO: 12444 - RNA, 84 nt, synthetic construct
  source 1..84: mol_type = other RNA
aaaaataaaaaaaaaaaaaaaaaaaaaaaaaaaaaaaaaaataaaaaaaaaaaaaaaaaaaaaaaaaaaaaaaaaaaaaatata

SEQ ID NO: 12445 - RNA, 84 nt, synthetic construct
  source 1..84: mol_type = other RNA
aaaaataaaaaaaaaaaaaaaaaaaaaaaaaaaaaaaaaaaaaaataaaaaaaaaaaaaaaaaaaaaaaaaaaaaaaaaatata

SEQ ID NO: 12446 - RNA, 84 nt, synthetic construct
  source 1..84: mol_type = other RNA
aaaaataaaaaaaaaaaaaaaaaaaaaaaaaaaaaaaaaaaaaaaaaaaaaaataaaaaaaaaaaaaaaaaaaaaaaaaatata

SEQ ID NO: 12447 - RNA, 84 nt, synthetic construct
  source 1..84: mol_type = other RNA
aaaaataaaaaaaaaataaaaaaaaaaaaaaaaaaaaaaaaaaaaaaaaaaaaaaaaaaaaaaaaaaaaaaaaaaaaaaatata

SEQ ID NO: 12448 - RNA, 84 nt, synthetic construct
  source 1..84: mol_type = other RNA
aaaaataaaaaaaaaaaaaaaaaaaaaaaaaaaaaaataaaaaaaaaaaaaaaaaaaaaaaaaaaaaaaaaaaaaaaaaatata

SEQ ID NO: 12449 - RNA, 84 nt, synthetic construct
  source 1..84: mol_type = other RNA
aaaaataaaaaaaaaaaaaaaaaaaaaaaaaaaaaaaaaaaaaaaaaaaaaaaaaaaaaaaaaataaaaaaaaaaaaaaatata

SEQ ID NO: 12450 - RNA, 84 nt, synthetic construct
  source 1..84: mol_type = other RNA
aaaaataaaaaaaaataaaaaaaaaaaaaaaaaaaaaaaaaaaaaaaaaaaaaaaaaaaaaaaaaaaaaaaaaaaaaaaatata

SEQ ID NO: 12451 - RNA, 84 nt, synthetic construct
  source 1..84: mol_type = other RNA
aaaaataaaaaaaaaaaaaaaaaaaaaaaaaaaaaaaaaaaaaaaaaaaaaaaaaaaaaaaaaaaaaaaaaataaaaaaatata

SEQ ID NO: 12452 - RNA, 84 nt, synthetic construct
  source 1..84: mol_type = other RNA
aaaaataaaaaaaaaaaaaaaaaaaaaaataaaaaaaaaaaaaaaaaaaaaaaaaaaaaaaaaaaaaaaaaaaaaaaaaatata

SEQ ID NO: 12453 - RNA, 84 nt, synthetic construct
  source 1..84: mol_type = other RNA
aaaaataaaaaaaaaaaaaaaaaaaaaaaaaaaaaataaaaaaaaaaaaaaaaaaaaaaaaaaaaaaaaaaaaaaaaaaatata

SEQ ID NO: 12454 - RNA, 84 nt, synthetic construct
  source 1..84: mol_type = other RNA
aaaaataaaaaaaaaaaaaaaaaaaaaaaaaaaaaaaaaaaaaaaaaaaaaaaataaaaaaaaaaaaaaaaaaaaaaaaatata

SEQ ID NO: 12455 - RNA, 84 nt, synthetic construct
  source 1..84: mol_type = other RNA
aaaaataaaaaaaaaaaaaaaaaaaataaaaaaaaaaaaaaaaaaaaaaaaaaaaaaaaaaaaaaaaaaaaaaaaaaaaatata

SEQ ID NO: 12456 - RNA, 84 nt, synthetic construct
  source 1..84: mol_type = other RNA
aaaaataaaaaaaaaaaaaaaaaaaaaaaaaaaaaaaaaaaaaaaaaaaaaaaaaaaataaaaaaaaaaaaaaaaaaaaatata

SEQ ID NO: 12457 - RNA, 84 nt, synthetic construct
  source 1..84: mol_type = other RNA
aaaaataaaaaaaataaaaaaaaaaaaaaaaaaaaaaaaaaaaaaaaaaaaaaaaaaaaaaaaaaaaaaaaaaaaaaaaatata

SEQ ID NO: 12458 - RNA, 84 nt, synthetic construct
  source 1..84: mol_type = other RNA
aaaaataaaaaataaaaaaaaaaaaaaaaaaaaaaaaaaaaaaaaaaaaaaaaaaaaaaaaaaaaaaaaaaaaaaaaaaatata

SEQ ID NO: 12459 - RNA, 84 nt, synthetic construct
  source 1..84: mol_type = other RNA
aaaaataaaaaaaaaaataaaaaaaaaaaaaaaaaaaaaaaaaaaaaaaaaaaaaaaaaaaaaaaaaaaaaaaaaaaaaatata

SEQ ID NO: 12460 - RNA, 84 nt, synthetic construct
  source 1..84: mol_type = other RNA
aaaaataaaaaaaaaaaaaaaaaaaaaaaaaaaaaaaaaaaaaaaaaaaaaaaaaaataaaaaaaaaaaaaaaaaaaaaatata

SEQ ID NO: 12461 - RNA, 84 nt, synthetic construct
  source 1..84: mol_type = other RNA
aaaaataaaaaaaaaaaaaaaaaaaaaaaaaaaaaaaaaaaaaaaaaaaaaaaaaaaaaaaaaaaaaataaaaaaaaaaatata

SEQ ID NO: 12462 - RNA, 84 nt, synthetic construct
  source 1..84: mol_type = other RNA
aaaaataaaaaaaaaaaaaaaaaaaaaaaaaaaaaaaaaaaaaaaaaaaaaaaaaaaaaaaataaaaaaaaaaaaaaaaatata

SEQ ID NO: 12463 - RNA, 84 nt, synthetic construct
  source 1..84: mol_type = other RNA
aaaaataaaaaaaaaaaaaaaaaaaaaaaaaaaaaaaaaaaaaaaaaataaaaaaaaaaaaaaaaaaaaaaaaaaaaaaatata

SEQ ID NO: 12464 - RNA, 84 nt, synthetic construct
  source 1..84: mol_type = other RNA
aaaaataaaaaaaaaaaaaaaaaaaaaaaaaaaaaaaaaaaaaaaaaaaaaaaaaaaaaaaaaaaaaaaaataaaaaaaatata

SEQ ID NO: 12465 - RNA, 84 nt, synthetic construct
  source 1..84: mol_type = other RNA
aaaaataaaaaaaaaaaaaaaaaaaaaaaaaaaaaaaaaaataaataaaaaaaaaaaaaaaaaaaaaaaaaaaaaaaaaatata

SEQ ID NO: 12466 - RNA, 84 nt, synthetic construct
  source 1..84: mol_type = other RNA
aaaaataaaaaaaaaaaaaaaaaaaaaaaaaaaaaaaaaaaaaaataaaaaaaaaaaaaaaaaaaaaaaaaaaaaataaatata

SEQ ID NO: 12467 - RNA, 84 nt, synthetic construct
  source 1..84: mol_type = other RNA
aaaaataaaaaaaaaaaaaaaaaaaaaaaaaaaaaaaaaaataaaaaaaaaaaaaaaaaaaaaaaaaaaaaaaaaataaatata

SEQ ID NO: 12468 - RNA, 84 nt, synthetic construct
  source 1..84: mol_type = other RNA
aaaaataaaaaaaaaaaaaaaaaaaaaaaaaaaaaaataaataaaaaaaaaaaaaaaaaaaaaaaaaaaaaaaaaaaaaatata

SEQ ID NO: 12469 - RNA, 84 nt, synthetic construct
  source 1..84: mol_type = other RNA
aaaaataaaaaaaaaaaaaaaaaaaaaaaaaaaaaaaaaaaaaaaaaaaaaaataaaaaaaaaaaaaaaaaaaaaataaatata

SEQ ID NO: 12470 - RNA, 84 nt, synthetic construct
  source 1..84: mol_type = other RNA
aaaaataaaaaaaaaaaaaaaaaaaaaaaaaaaaaaaaaaataaataaaaaaaaaaaaaaaaaaaaaaaaaaaaaataaatata

SEQ ID NO: 12471 - RNA, 84 nt, synthetic construct
  source 1..84: mol_type = other RNA
aaaaataaaaaaaaaaaaaaaaaaaaaaaaaaaaaaataaataaataaaaaaaaaaaaaaaaaaaaaaaaaaaaaaaaaatata

SEQ ID NO: 12472 - RNA, 84 nt, synthetic construct
  source 1..84: mol_type = other RNA
aaaaataaaaaaaaaaaaaaaaaaaaaaaaaaaaaaataaataaaaaaaaaaaaaaaaaaaaaaaaaaaaaaaaaataaatata

SEQ ID NO: 12473 - RNA, 84 nt, synthetic construct
  source 1..84: mol_type = other RNA
aaaaataaaaaaaaaaaaaaaaaaaaaaaaaaaaaaataaataaataaaaaaaaaaaaaaaaaaaaaaaaaaaaaataaatata

SEQ ID NO: 12474 - RNA, 84 nt, synthetic construct
  source 1..84: mol_type = other RNA
aaaaataaaaaaaaaaaaaaaaaaaaaaaaaaaaaaaaaaaaaaaaaaaaaaaaaaaaaaaaaaaaaaaaaaaaaaataatata

SEQ ID NO: 12475 - RNA, 84 nt, synthetic construct
  source 1..84: mol_type = other RNA
aaaaaaaaaaaaaataaatataaaaaaaaaaaaaataaaaaaaaaaaaaaaaaaaaaaaaaaaaaaaaaaaaaaaaaaaatata

SEQ ID NO: 12476 - RNA, 84 nt, synthetic construct
  source 1..84: mol_type = other RNA
aaaaataaaaaaaaaaaaaaaaaaaaaaaaaaaaatataaataaataaaaaaaaaaaaaaaaaaaaaaaaaaaaaaaaaatata

SEQ ID NO: 12477 - RNA, 84 nt, synthetic construct
  source 1..84: mol_type = other RNA
aaaaaaaaaataaataaatataaaaaaaaaaaaaataaaaaaaaaaaaaaaaaaaaaaaaaaaaaaaaaaaaaaaaaaaatata

SEQ ID NO: 12478 - RNA, 84 nt, synthetic construct
  source 1..84: mol_type = other RNA
aaaaataaaaaaaaaaaaaaaaaaaaaaaaaaaaatataaataaataaaaaaaaaaaaaaaaaaaaaaaaaaaaaataaatata

SEQ ID NO: 12479 - RNA, 84 nt, synthetic construct
  source 1..84: mol_type = other RNA
aaaaaataaataaataaatataaaaaaaaaaaaaataaaaaaaaaaaaaaaaaaaaaaaaaaaaaaaaaaaaaaaaaaaatata

SEQ ID NO: 12480 - RNA, 84 nt, synthetic construct
  source 1..84: mol_type = other RNA
aaaaaaaaaataaataaatataaaaaaaaaataaataaaaaaaaaaaaaaaaaaaaaaaaaaaaaaaaaaaaaaaaaaaatata

SEQ ID NO: 12481 - RNA, 84 nt, synthetic construct
  source 1..84: mol_type = other RNA
aaaaaaaaaaaaaaaaaaaaaaaaataaataaataaataaaaaaaataaataaataaataaatataaataaaaaaaaaaatata

SEQ ID NO: 12482 - RNA, 84 nt, synthetic construct
  source 1..84: mol_type = other RNA
aaaaaaaaaaaaaaaaaaaaaaaaataaataaataaataaaaaaaataaataaataaataaatataaataaaaaaataaatata

SEQ ID NO: 12483 - RNA, 84 nt, synthetic construct
  source 1..84: mol_type = other RNA
aaaaaaaaaaaaaaaaaaaaaaaaataaataaataaataaaataaataaataaataaataaatataaataaaaaaaaaaatata

SEQ ID NO: 12484 - RNA, 84 nt, synthetic construct
  source 1..84: mol_type = other RNA
aaaaaaaaaaaaaaaaaaaaataaataaataaataaataaaaaaaataaataaataaataaatataaataaaaaaaaaaatata

SEQ ID NO: 12485 - RNA, 84 nt, synthetic construct
  source 1..84: mol_type = other RNA
aaaaaaaaaaaaaaaaaaaaaaaaataaataaataaataaaataaataaataaataaataaatataaataaaaaaataaatata

SEQ ID NO: 12486 - RNA, 84 nt, synthetic construct
  source 1..84: mol_type = other RNA
aaaaaaaaaaaaaaaaaaaaataaataaataaataaataaaaaaaataaataaataaataaatataaataaaaaaataaatata

SEQ ID NO: 12487 - RNA, 84 nt, synthetic construct
  source 1..84: mol_type = other RNA
aaaaaaaaaaaaaaaaaaaaataaataaataaataaataaaataaataaataaataaataaatataaataaaaaaaaaaatata

SEQ ID NO: 12488 - RNA, 84 nt, synthetic construct
  source 1..84: mol_type = other RNA
aaaaaaaaaaaaaaaaaaaaaaaaataaataaataaataaataaaataaataaataaataaatataaataaaaaaataaatata

SEQ ID NO: 12489 - RNA, 84 nt, synthetic construct
  source 1..84: mol_type = other RNA
aaaaaaaaaaaaaaaaaaaaataaataaataaataaataaataaaataaataaataaataaatataaataaaaaaaaaaatata

SEQ ID NO: 12490 - RNA, 84 nt, synthetic construct
  source 1..84: mol_type = other RNA
aaaaaaaaaaaaaaaaaaaaataaataaataaataaataaaataaataaataaataaataaatataaataaaaaaataaatata

SEQ ID NO: 12491 - RNA, 84 nt, synthetic construct
  source 1..84: mol_type = other RNA
aaaaaaaaaaaaaaaaaaaaataaataaataaataaataaataaaataaataaataaataaatataaataaaaaaataaatata

SEQ ID NO: 12492 - RNA, 84 nt, synthetic construct
  source 1..84: mol_type = other RNA
aaaaaaaataaataaataaataaataaataaataaataaatataaataaataaataaataaaaaaaaaataaataaaaaatata

SEQ ID NO: 12493 - RNA, 84 nt, synthetic construct
  source 1..84: mol_type = other RNA
aaaaataaaaaaaaaaaaaaaaaaaaaaaaaaaaaaaaaaataaaaaaaaaaaaaaaaaaaaaaaaaaaaaaaaaaaaaataaa

SEQ ID NO: 12494 - RNA, 84 nt, synthetic construct
  source 1..84: mol_type = other RNA
aaaaaaaataaataaataaataaataaataaataaataaatataaataaataaataaataaataaaaaataaataaaaaatata

SEQ ID NO: 12495 - RNA, 84 nt, synthetic construct
  source 1..84: mol_type = other RNA
aaaaataaaaaaaaaaaaaaaaaaaaaaaaaaaaaaaaaaataaataaaaaaaaaaaaaaaaaaaaaaaaaaaaaaaaaataaa

SEQ ID NO: 12496 - RNA, 84 nt, synthetic construct
  source 1..84: mol_type = other RNA
aaaaataaaaaaaaaaaaaaaaaaaaaaaaaaaaaaataaataaaaaaaaaaaaaaaaaaaaaaaaaaaaaaaaaaaaaataaa

SEQ ID NO: 12497 - RNA, 84 nt, synthetic construct
  source 1..84: mol_type = other RNA
aaaaataaaaaaaaaaaaaaaaaaaaaaaaaaaaaaaaaaaaaaataaaaaaaaaaaaaaaaaaaaaaaaaaaaaataaataaa

SEQ ID NO: 12498 - RNA, 84 nt, synthetic construct
  source 1..84: mol_type = other RNA
aaaaaaaaaaaaaaaaaaaataaataaataaaaaaaaaaaaaaaaaaaaaaaaataaataaataaaaaaaaaaaaaaaaaataa

SEQ ID NO: 12499 - RNA, 84 nt, synthetic construct
  source 1..84: mol_type = other RNA
aaaaataaaaaaaaaaaaaaaaaaaaaaaaaaaaaaaaaaataaataaaaaaaaaaaaaaaaaaaaaaaaaaaaaataaataaa

SEQ ID NO: 12500 - RNA, 84 nt, synthetic construct
  source 1..84: mol_type = other RNA
aaaaataaaaaaaaaaaaaaaaaaaaaaaaaaaaaaataaataaataaaaaaaaaaaaaaaaaaaaaaaaaaaaaaaaaataaa

SEQ ID NO: 12501 - RNA, 84 nt, synthetic construct
  source 1..84: mol_type = other RNA
aaaaataaaaaaaaaaaaaaaaaaaaaaaaaaaaaaataaataaataaaaaaaaaaaaaaaaaaaaaaaaaaaaaataaataaa

SEQ ID NO: 12502 - RNA, 84 nt, synthetic construct
  source 1..84: mol_type = other RNA
aaaaaaataaaaaaaaaaaaaaaaaaaaaataaaaaaaaaaaaaaaaaaaaaaaaataaataaataaataaataaataaataaa

SEQ ID NO: 12503 - RNA, 84 nt, synthetic construct
  source 1..84: mol_type = other RNA
aaaaaaataaaaaaaaaaaaaaaaaataaataaaaaaaaaaaaaaaaaaaaaaaaataaataaataaataaataaataaataaa

SEQ ID NO: 12504 - RNA, 84 nt, synthetic construct
  source 1..84: mol_type = other RNA
aaaaaaaataaataaataaataaataaataaataaataaatataaataaataaataaataaaaaaaaaataaataaataatata

SEQ ID NO: 12505 - RNA, 84 nt, synthetic construct
  source 1..84: mol_type = other RNA
aaaaaaaataaataaataaataaataaataaataaataaatataaataaataaataaataaataaaaaataaataaataatata

SEQ ID NO: 12506 - RNA, 84 nt, synthetic construct
  source 1..84: mol_type = other RNA
aaaaaataaataaataaatataaaaaaaaaaaaaatataaaaaaaaaaaaaaaaaaaaaaaaaaaaaaaaaaaaaaaaaatata

SEQ ID NO: 12507 - RNA, 84 nt, synthetic construct
  source 1..84: mol_type = other RNA
aaaaaaaaaaaaaaaaaaaaaaaaataaataaataaataaaaaaaataaataaataaataaatataaatataaaaataaatata

SEQ ID NO: 12508 - RNA, 84 nt, synthetic construct
  source 1..84: mol_type = other RNA
aaatataaataaaaaaaataaaaaaaaaaaaaaaaaaaaaaaaaaaaaaaaaataaaaaaaaaaaaaataaataaataaatata

SEQ ID NO: 12509 - RNA, 84 nt, synthetic construct
  source 1..84: mol_type = other RNA
aaaaaaaaaaaaaaaaaaaaaaaaataaataaataaataaaataaataaataaataaataaatataaatataaaaataaatata

SEQ ID NO: 12510 - RNA, 84 nt, synthetic construct
  source 1..84: mol_type = other RNA
aaaaaaaaaaaaaaaaaaaaataaataaataaataaataaaaaaaataaataaataaataaatataaatataaaaataaatata

SEQ ID NO: 12511 - RNA, 84 nt, synthetic construct
  source 1..84: mol_type = other RNA
aaaaaaaaaaaaaaaaaaatataaataaataaataaataaaaaaaataaataaataaataaatataaataaaaaaataaatata

SEQ ID NO: 12512 - RNA, 84 nt, synthetic construct
  source 1..84: mol_type = other RNA
aaaaaaaaaaaaaaaaaaaaaaaaataaataaataaataaataaaataaataaataaataaatataaatataaaaataaatata

SEQ ID NO: 12513 - RNA, 84 nt, synthetic construct
  source 1..84: mol_type = other RNA
aaatataaataaaataaataaaaaaaaaaaaaaaaaaaaaaaaaaaaaaaaaataaaaaaaaaaaaaataaataaataaatata

SEQ ID NO: 12514 - RNA, 84 nt, synthetic construct
  source 1..84: mol_type = other RNA
aaaaaaaaaaaaaaaaaaaaataaataaataaataaataaaataaataaataaataaataaatataaatataaaaataaatata

SEQ ID NO: 12515 - RNA, 84 nt, synthetic construct
  source 1..84: mol_type = other RNA
aaaaaaaaaaaaaaaaaaaaataaataaataaataaataaataaaataaataaataaataaatataaatataaaaataaatata

SEQ ID NO: 12516 - RNA, 84 nt, synthetic construct
  source 1..84: mol_type = other RNA
aaaaaaaaaaaaaaaaaaatataaataaataaataaataaaataaataaataaataaataaatataaataaaaaaataaatata

SEQ ID NO: 12517 - RNA, 84 nt, synthetic construct
  source 1..84: mol_type = other RNA
aaatataaataaaataaataaataaaaaaaaaaaaaaaaaaaaaaaaaaaaaataaaaaaaaaaaaaataaataaataaatata

SEQ ID NO: 12518 - RNA, 84 nt, synthetic construct
  source 1..84: mol_type = other RNA
aaaaaaaataaataaataaataaataaataaataaataaatataaataaataaataaataaaaaaaatataaataaaaaatata

SEQ ID NO: 12519 - RNA, 84 nt, synthetic construct
  source 1..84: mol_type = other RNA
aaaaaaaaaaaaaaaaaaaataaataaataaaaaaaaaaaaaaaaaaaaaaaaataaataaataaaaaaaaaaaaaaaatataa

SEQ ID NO: 12520 - RNA, 84 nt, synthetic construct
  source 1..84: mol_type = other RNA
aaaaataaaaaaaaaaaaaaaaaaaaaaaaaaaaatataaataaataaaaaaaaaaaaaaaaaaaaaaaaaaaaaaaaaataaa

SEQ ID NO: 12521 - RNA, 84 nt, synthetic construct
  source 1..84: mol_type = other RNA
aaaaaaaaaaaaaaaaaaaataaataaataaaaaaaaaaaaaaaaaaaaaaaaataaataaataaaaaaaaaaaataaatataa

SEQ ID NO: 12522 - RNA, 84 nt, synthetic construct
  source 1..84: mol_type = other RNA
aaaaaaaaaaaaaaaataaataaataaataaaaaaaaaaaaaaaaaaaaaaaaataaataaataaaaaaaaaaaaaaaatataa

SEQ ID NO: 12523 - RNA, 84 nt, synthetic construct
  source 1..84: mol_type = other RNA
aaaaataaaaaaaaaaaaaaaaaaaaaaaaaaaaatataaataaataaaaaaaaaaaaaaaaaaaaaaaaaaaaaataaataaa

SEQ ID NO: 12524 - RNA, 84 nt, synthetic construct
  source 1..84: mol_type = other RNA
aaaaaaaaaaaaaaaataaataaataaataaaaaaaaaaaaaaaaaaaaaaaaataaataaataaaaaaaaaaaataaatataa

SEQ ID NO: 12525 - RNA, 84 nt, synthetic construct
  source 1..84: mol_type = other RNA
aaaaaaaaaatataaataaataaataaataaataaataaataaaaaaaaaaaaaaaaaaaaaaaaaaaaaaaaaataaaaataa

SEQ ID NO: 12526 - RNA, 84 nt, synthetic construct
  source 1..84: mol_type = other RNA
aaataaaataaataaataaataaataaataaataaataaatataaataaataaataaataaaaaaaaaataaataaaaaatata

SEQ ID NO: 12527 - RNA, 84 nt, synthetic construct
  source 1..84: mol_type = other RNA
aaaaaaataaaaaaaaaaaaaaaatataaataaaaaaaaaaaaaaaaaaaaaaaaataaataaataaataaataaataaataaa

SEQ ID NO: 12528 - RNA, 84 nt, synthetic construct
  source 1..84: mol_type = other RNA
aaaaaaataaaaaaaaaaaaaaaatataaataaataaaaaaaaaaaaaaaaaaaaataaataaataaataaataaataaataaa

SEQ ID NO: 12529 - RNA, 84 nt, synthetic construct
  source 1..84: mol_type = other RNA
aaaaaaataaataaaaaaaaaaaatataaataaaaaaaaaaaaaaaaaaaaaaaaataaataaataaataaataaataaataaa

SEQ ID NO: 12530 - RNA, 84 nt, synthetic construct
  source 1..84: mol_type = other RNA
aaaaaaataaaaaaaaaaaataaatataaataaaaaaaaaaaaaaaaaaaaaaaaataaataaataaataaataaataaataaa

SEQ ID NO: 12531 - RNA, 84 nt, synthetic construct
  source 1..84: mol_type = other RNA
aaaaaaaaaaaaaaaaaaaaaaaaataaataaataaataaaaaaaataaataaataaataaatataaataaaaaaaaaaataaa

SEQ ID NO: 12532 - RNA, 84 nt, synthetic construct
  source 1..84: mol_type = other RNA
aaaaaaatataaataaaaaaaaaaaataaataaataaaaaaaaaaaaaaaaaaaaataaataaataaataaataaataaataaa

SEQ ID NO: 12533 - RNA, 84 nt, synthetic construct
  source 1..84: mol_type = other RNA
aaaaaaataaaaaaaaaaaataaatataaataaataaaaaaaaaaaaaaaaaaaaataaataaataaataaataaataaataaa

SEQ ID NO: 12534 - RNA, 84 nt, synthetic construct
  source 1..84: mol_type = other RNA
aaaaaaataaataaaaaaaaaaaatataaataaataaaaaaaaaaaaaaaaaaaaataaataaataaataaataaataaataaa

SEQ ID NO: 12535 - RNA, 84 nt, synthetic construct
  source 1..84: mol_type = other RNA
aaaaaaataaataaataaaaaaaatataaataaaaaaaaaaaaaaaaaaaaaaaaataaataaataaataaataaataaataaa

SEQ ID NO: 12536 - RNA, 84 nt, synthetic construct
  source 1..84: mol_type = other RNA
aaaaaaataaataaataaaaaaaatataaataaataaaaaaaaaaaaaaaaaaaaataaataaataaataaataaataaataaa

SEQ ID NO: 12537 - RNA, 84 nt, synthetic construct
  source 1..84: mol_type = other RNA
aaaaaaataaataaataaaataaatataaataaataaaaaaaaaaaaaaaaaaaaataaataaataaataaataaataaataaa

SEQ ID NO: 12538 - RNA, 84 nt, synthetic construct
  source 1..84: mol_type = other RNA
aaaaatataaataaataaataaaaaataaataaataaaaaaaaaaaaaaaaaaaaataaataaataaataaataaataaataaa

SEQ ID NO: 12539 - RNA, 84 nt, synthetic construct
  source 1..84: mol_type = other RNA
caaaataaaaaaaaaaaaaaaaaaaaaaaaaaaaaaaaaaaaaaaaaaaaaaaaaaaaaaaaaaaaaaaaaaaaaaaaaatata

SEQ ID NO: 12540 - RNA, 84 nt, synthetic construct
  source 1..84: mol_type = other RNA
aaaaataaaaaaaaaaaaaaaaaaaaaaaaaaaaaaaaaaaaaaataaaaaaataaaaaaaaaaaaaaaaaaaaaaaaaatata

SEQ ID NO: 12541 - RNA, 84 nt, synthetic construct
  source 1..84: mol_type = other RNA
aaaaataaaaaaaaaaaaaaaaaaaaaaaaaaaaaaaaaaataaaaaaaaaaataaaaaaaaaaaaaaaaaaaaaaaaaatata

SEQ ID NO: 12542 - RNA, 84 nt, synthetic construct
  source 1..84: mol_type = other RNA
aaaaataaaaaaaaaaaaaaaaaaaaaaaaaaaaaaataaaaaaataaaaaaaaaaaaaaaaaaaaaaaaaaaaaaaaaatata

SEQ ID NO: 12543 - RNA, 84 nt, synthetic construct
  source 1..84: mol_type = other RNA
aaaaataaaaaaaaaaaaaaaaaaaaaaaaaaaaaaaaaaataaaaaaaaaaaaaaaaaaataaaaaaaaaaaaaaaaaatata

SEQ ID NO: 12544 - RNA, 84 nt, synthetic construct
  source 1..84: mol_type = other RNA
aaaaataaaaaaaaaaaaaaaaaaaaaaaaaaaaaaaaaaaaaaataaaaaaaaaaaaaaataaaaaaaaaaaaaaaaaatata

SEQ ID NO: 12545 - RNA, 84 nt, synthetic construct
  source 1..84: mol_type = other RNA
aaaaataaaaaaaaaaaaaaaaaaaaaaaaaaaaaaaaaaataaaaaaaaaaaaaaataaaaaaaaaaaaaaaaaaaaaatata

SEQ ID NO: 12546 - RNA, 85 nt, synthetic construct
  source 1..85: mol_type = other RNA
aaataaataaataaataaataaataaataaataaataataaataaaaaaaaaaaaaaaaaaaaaaaaaaaaaaaaaataaatata

SEQ ID NO: 12547 - RNA, 85 nt, synthetic construct
  source 1..85: mol_type = other RNA
aaataaataaataaataaataaataaataaataaataataaataaaaaaaaaaaaaaaaaaaaaaaaaaaaaataaataaatata

SEQ ID NO: 12548 - RNA, 85 nt, synthetic construct
  source 1..85: mol_type = other RNA
aaataaataaataaataaataaataaataaataaataataaataaataaaaaaaaaaaaaaaaaaaaaaaaaaaaaataaatata

SEQ ID NO: 12549 - RNA, 85 nt, synthetic construct
  source 1..85: mol_type = other RNA
aaaaaaaaaaaaaaaaaaaaaaataaataaataaataataaataaaaaaaaaaaaaaaaaaaaaaaaaaaaaaaaaataaatata

SEQ ID NO: 12550 - RNA, 85 nt, synthetic construct
  source 1..85: mol_type = other RNA
aaaaaaaaaaaaaaaaaaataaataaataaataaataataaataaaaaaaaaaaaaaaaaaaaaaaaaaaaaaaaaataaatata

SEQ ID NO: 12551 - RNA, 85 nt, synthetic construct
  source 1..85: mol_type = other RNA
aaaaaaaaaaaaaaataaataaataaataaataaataataaataaaaaaaaaaaaaaaaaaaaaaaaaaaaaaaaaataaatata

SEQ ID NO: 12552 - RNA, 85 nt, synthetic construct
  source 1..85: mol_type = other RNA
aaaaaaaaaaataaataaataaataaataaataaataataaataaaaaaaaaaaaaaaaaaaaaaaaaaaaaaaaaataaatata

SEQ ID NO: 12553 - RNA, 85 nt, synthetic construct
  source 1..85: mol_type = other RNA
aaaaaaaaaaaaaaataaataaataaataaataaataataaataaaaaaaaaaaaaaaaaaaaaaaaaaaaaataaataaatata

SEQ ID NO: 12554 - RNA, 85 nt, synthetic construct
  source 1..85: mol_type = other RNA
aaaaaaataaataaataaataaataaataaataaataataaataaaaaaaaaaaaaaaaaaaaaaaaaaaaaaaaaataaatata

SEQ ID NO: 12555 - RNA, 85 nt, synthetic construct
  source 1..85: mol_type = other RNA
aaaaaaaaaaataaataaataaataaataaataaataataaataaaaaaaaaaaaaaaaaaaaaaaaaaaaaataaataaatata

SEQ ID NO: 12556 - RNA, 85 nt, synthetic construct
  source 1..85: mol_type = other RNA
aaaaaaataaataaataaataaataaataaataaataataaataaaaaaaaaaaaaaaaaaaaaaaaaaaaaataaataaatata

SEQ ID NO: 12557 - RNA, 85 nt, synthetic construct
  source 1..85: mol_type = other RNA
aaataaataaataaatataaatataaataaataaataataaataaaaaaaaaaaaaaaaaaaaaaaaaaaaaaaaaataaatata

SEQ ID NO: 12558 - RNA, 85 nt, synthetic construct
  source 1..85: mol_type = other RNA
aaataaataaataaatataaatataaataaataaataataaataaaaaaaaaaaaaaaaaaaaaaaaaaaaaataaataaatata

SEQ ID NO: 12559 - RNA, 85 nt, synthetic construct
  source 1..85: mol_type = other RNA
aaataaataaataaataaatatataaataaataaataataaataaaaaaaaaaaaaaaaaaaaaaaaaaaaaaaaaataaatata

SEQ ID NO: 12560 - RNA, 85 nt, synthetic construct
  source 1..85: mol_type = other RNA
aaataaataaataaatatataaataaataaataaataataaataaaaaaaaaaaaaaaaaaaaaaaaaaaaaaaaaataaatata

SEQ ID NO: 12561 - RNA, 85 nt, synthetic construct
  source 1..85: mol_type = other RNA
aaataaataaataaataaataaataaatatataaataataaataaaaaaaaaaaaaaaaaaaaaaaaaaaaaaaaaataaatata

SEQ ID NO: 12562 - RNA, 85 nt, synthetic construct
  source 1..85: mol_type = other RNA
aaataaataaataaataaatatataaataaataaataataaataaaaaaaaaaaaaaaaaaaaaaaaaaaaaataaataaatata

SEQ ID NO: 12563 - RNA, 85 nt, synthetic construct
  source 1..85: mol_type = other RNA
aaaaaaaaaataaatataaataaatataaataaaaaaaaaaaaaaaaaaaaaaaaaaaaaaaaaaaaaaaaaaaaataaatataa

SEQ ID NO: 12564 - RNA, 85 nt, synthetic construct
  source 1..85: mol_type = other RNA
aaaaaaaaaataaatataaataaatataaataaaaaaaaaaaaaaaaaaaaaaaaaaaaaaaaaaaaaaaaataaataaatataa

SEQ ID NO: 12565 - RNA, 85 nt, synthetic construct
  source 1..85: mol_type = other RNA
aaaaaaaaaataaatataaataaatataaataaaaaaaaaaaaaaaaaaaaaaaaaaaaaaaaaaaaaaaaataaatataaataa

SEQ ID NO: 12566 - RNA, 85 nt, synthetic construct
  source 1..85: mol_type = other RNA
aaaaaaaaaataaatataaataaatataaataaaaaaaaaaaaaaaaaaaaaaaaaaaaaaaaaaaaataaataaataaatataa

SEQ ID NO: 12567 - RNA, 85 nt, synthetic construct
  source 1..85: mol_type = other RNA
aaaaaataaataaatataaataaatataaataaaaaaaaaaaaaaaaaaaaaaaaaaaaaaaaaaaaaaaaataaataaatataa

SEQ ID NO: 12568 - RNA, 85 nt, synthetic construct
  source 1..85: mol_type = other RNA
aaaaaaaaaataaatataaataaatataaataaataaaaaaaaaaaaaaaaaaaaaaaaaaaaaaaaaaaaataaatataaataa

SEQ ID NO: 12569 - RNA, 85 nt, synthetic construct
  source 1..85: mol_type = other RNA
aaaaaaaaaataaatataaataaatataaataaataaaaaaaaaaaaaaaaaaaaaaaaaaaaaaaaaaaaataaataaatataa

SEQ ID NO: 12570 - RNA, 85 nt, synthetic construct
  source 1..85: mol_type = other RNA
aaaaaaaaaataaatataaataaatataaataaaaaaaaaaaaaaaaaaaaaaaaaaaaaaaaaaaaataaataaatataaataa

SEQ ID NO: 12571 - RNA, 85 nt, synthetic construct
  source 1..85: mol_type = other RNA
aaaaaataaataaatataaataaatataaataaaaaaaaaaaaaaaaaaaaaaaaaaaaaaaaaaaaataaataaataaatataa

SEQ ID NO: 12572 - RNA, 85 nt, synthetic construct
  source 1..85: mol_type = other RNA
aaaaaaaaaataaatataaataaatataaataaataaaaaaaaaaaaaaaaaaaaaaaaaaaaaaaaataaataaataaatataa

SEQ ID NO: 12573 - RNA, 85 nt, synthetic construct
  source 1..85: mol_type = other RNA
aaaaaataaataaatataaataaatataaataaataaaaaaaaaaaaaaaaaaaaaaaaaaaaaaaaaaaaataaataaatataa

SEQ ID NO: 12574 - RNA, 85 nt, synthetic construct
  source 1..85: mol_type = other RNA
aaaaaaaaaaaaaaaaaaaaatataaataaataaataataaataaaaaaaaaaaaaaaaaaaaaaaaaaaaaaaaaataaatata

SEQ ID NO: 12575 - RNA, 85 nt, synthetic construct
  source 1..85: mol_type = other RNA
aaaaaaaaaaaaaaaaataaatataaataaataaataataaataaaaaaaaaaaaaaaaaaaaaaaaaaaaaaaaaataaatata

SEQ ID NO: 12576 - RNA, 85 nt, synthetic construct
  source 1..85: mol_type = other RNA
aaaaaaaaaaaaaaaaatataaataaataaataaataataaataaaaaaaaaaaaaaaaaaaaaaaaaaaaaaaaaataaatata

SEQ ID NO: 12577 - RNA, 85 nt, synthetic construct
  source 1..85: mol_type = other RNA
aaaaaaaaaaaaaaaaataaatataaataaataaataataaataaaaaaaaaaaaaaaaaaaaaaaaaaaaaataaataaatata

SEQ ID NO: 12578 - RNA, 85 nt, synthetic construct
  source 1..85: mol_type = other RNA
aaaaaaaaaataaatataaataaatataaataaaaaaaaaaaaaaaaaaaaaaaaaaaaaaaaaaaaaaaaataaatataaatat

SEQ ID NO: 12579 - RNA, 85 nt, synthetic construct
  source 1..85: mol_type = other RNA
aaataaaaaaaaaaaaaaaaaaataaataaataaataataaataaaaaaaaaaaaaaaaaaaaaaaaaaaaaaaaaataaatata

SEQ ID NO: 12580 - RNA, 85 nt, synthetic construct
  source 1..85: mol_type = other RNA
aaaaaataaataaatataaataaatataaataaaaaaaaaaaaaaaaaaaaaaaaaaaaaaaaaaaaaaaaataaatataaatat

SEQ ID NO: 12581 - RNA, 85 nt, synthetic construct
  source 1..85: mol_type = other RNA
aaaaaaaaaataaatataaataaatataaataaataaaaaaaaaaaaaaaaaaaaaaaaaaaaaaaaaaaaataaatataaatat

SEQ ID NO: 12582 - RNA, 85 nt, synthetic construct
  source 1..85: mol_type = other RNA
aaaaaaaaaataaatataaataaatataaataaaaaaaaaaaaaaaaaaaaaaaaaaaaaaaaaaaaataaataaatataaatat

SEQ ID NO: 12583 - RNA, 85 nt, synthetic construct
  source 1..85: mol_type = other RNA
aaataaataaaaaaaaaaaaaaataaataaataaataataaataaaaaaaaaaaaaaaaaaaaaaaaaaaaaaaaaataaatata

SEQ ID NO: 12584 - RNA, 85 nt, synthetic construct
  source 1..85: mol_type = other RNA
aaataaaaaaaaaaaaaaataaataaataaataaataataaataaaaaaaaaaaaaaaaaaaaaaaaaaaaaaaaaataaatata

SEQ ID NO: 12585 - RNA, 85 nt, synthetic construct
  source 1..85: mol_type = other RNA
aaaaaataaataaatataaataaatataaataaataaaaaaaaaaaaaaaaaaaaaaaaaaaaaaaaaaaaataaatataaatat

SEQ ID NO: 12586 - RNA, 85 nt, synthetic construct
  source 1..85: mol_type = other RNA
aaaaaataaataaatataaataaatataaataaaaaaaaaaaaaaaaaaaaaaaaaaaaaaaaaaaaataaataaatataaatat

SEQ ID NO: 12587 - RNA, 85 nt, synthetic construct
  source 1..85: mol_type = other RNA
aaaaaaaaaataaatataaataaatataaataaataaaaaaaaaaaaaaaaaaaaaaaaaaaaaaaaataaataaatataaatat

SEQ ID NO: 12588 - RNA, 85 nt, synthetic construct
  source 1..85: mol_type = other RNA
aaataaataaataaaaaaaaaaataaataaataaataataaataaaaaaaaaaaaaaaaaaaaaaaaaaaaaaaaaataaatata

SEQ ID NO: 12589 - RNA, 85 nt, synthetic construct
  source 1..85: mol_type = other RNA
aaataaaaaaaaaaataaataaataaataaataaataataaataaaaaaaaaaaaaaaaaaaaaaaaaaaaaaaaaataaatata

SEQ ID NO: 12590 - RNA, 85 nt, synthetic construct
  source 1..85: mol_type = other RNA
aaaaaataaataaatataaataaatataaataaataaaaaaaaaaaaaaaaaaaaaaaaaaaaaaaaataaataaatataaatat

SEQ ID NO: 12591 - RNA, 85 nt, synthetic construct
  source 1..85: mol_type = other RNA
aaataaataaataaataaaaaaataaataaataaataataaataaaaaaaaaaaaaaaaaaaaaaaaaaaaaaaaaataaatata

SEQ ID NO: 12592 - RNA, 85 nt, synthetic construct
  source 1..85: mol_type = other RNA
aaataaaaaaataaataaataaataaataaataaataataaataaaaaaaaaaaaaaaaaaaaaaaaaaaaaaaaaataaatata

SEQ ID NO: 12593 - RNA, 85 nt, synthetic construct
  source 1..85: mol_type = other RNA
aaataaataaaaaaataaataaataaataaataaataataaataaaaaaaaaaaaaaaaaaaaaaaaaaaaaaaaaataaatata

SEQ ID NO: 12594 - RNA, 85 nt, synthetic construct
  source 1..85: mol_type = other RNA
aaataaataaataaaaaaaaaaataaataaataaataataaataaaaaaaaaaaaaaaaaaaaaaaaaaaaaataaataaatata

SEQ ID NO: 12595 - RNA, 85 nt, synthetic construct
  source 1..85: mol_type = other RNA
aaataaataaataaataaataaataaaaaaataaataataaataaaaaaaaaaaaaaaaaaaaaaaaaaaaaaaaaataaatata

SEQ ID NO: 12596 - RNA, 85 nt, synthetic construct
  source 1..85: mol_type = other RNA
aaataaaaaaataaataaataaataaataaataaataataaataaaaaaaaaaaaaaaaaaaaaaaaaaaaaataaataaatata

SEQ ID NO: 12597 - RNA, 85 nt, synthetic construct
  source 1..85: mol_type = other RNA
aaataaataaataaataaataaataaataaataaataataaataaaaaaaaaaaaaaaaaaaaaataaaaaaaaaaataaatata

SEQ ID NO: 12598 - RNA, 85 nt, synthetic construct
  source 1..85: mol_type = other RNA
aaataaataaataaataaataaataaataaataaataataaataaaaaaaaaaaaaaaaaaaaaaaaataaaaaaaataaatata

SEQ ID NO: 12599 - RNA, 85 nt, synthetic construct
  source 1..85: mol_type = other RNA
aaataaataaataaataaataaataaataaataaataataaataaaaaaaaataaaaaaaaaaaaaaaaaaaaaaaataaatata

SEQ ID NO: 12600 - RNA, 85 nt, synthetic construct
  source 1..85: mol_type = other RNA
aaataaataaataaataaataaataaataaataaataataaataaaaaaaaaaaaaaaaaaataaaaaaaaaaaaaataaatata

SEQ ID NO: 12601 - RNA, 85 nt, synthetic construct
  source 1..85: mol_type = other RNA
aaaaaaaaaataaatataaataaatataaataaaaaaaaaaaaaaaaaaaaaaaaaaaaaaaaaaaaaaaaataaataaatatat

SEQ ID NO: 12602 - RNA, 85 nt, synthetic construct
  source 1..85: mol_type = other RNA
aaaaaaaaaataaatataaataaatataaataaataaaaaaaaaaaaaaaaaaaaaaaaaaaaaaaaaaaaataaataaatatat

SEQ ID NO: 12603 - RNA, 85 nt, synthetic construct
  source 1..85: mol_type = other RNA
aaaaaataaataaatataaataaatataaataaaaaaaaaaaaaaaaaaaaaaaaaaaaaaaaaaaaaaaaataaataaatatat

SEQ ID NO: 12604 - RNA, 85 nt, synthetic construct
  source 1..85: mol_type = other RNA
aaaaaaaaaataaatataaataaatataaataaaaaaaaaaaaaaaaaaaaaaaaaaaaaaaaaaaaataaataaataaatatat

SEQ ID NO: 12605 - RNA, 85 nt, synthetic construct
  source 1..85: mol_type = other RNA
aaaaaataaataaatataaataaatataaataaataaaaaaaaaaaaaaaaaaaaaaaaaaaaaaaaaaaaataaataaatatat

SEQ ID NO: 12606 - RNA, 85 nt, synthetic construct
  source 1..85: mol_type = other RNA
aaaaaaaaaataaatataaataaatataaataaataaaaaaaaaaaaaaaaaaaaaaaaaaaaaaaaataaataaataaatatat

SEQ ID NO: 12607 - RNA, 85 nt, synthetic construct
  source 1..85: mol_type = other RNA
aaaaaataaataaatataaataaatataaataaaaaaaaaaaaaaaaaaaaaaaaaaaaaaaaaaaaataaataaataaatatat

SEQ ID NO: 12608 - RNA, 85 nt, synthetic construct
  source 1..85: mol_type = other RNA
aaaaaataaataaatataaataaatataaataaataaaaaaaaaaaaaaaaaaaaaaaaaaaaaaaaataaataaataaatatat

SEQ ID NO: 12609 - RNA, 85 nt, synthetic construct
  source 1..85: mol_type = other RNA
aaaaaaaaaaaaaaaaaaaaaaaaaaaaaaaaaaaataaaaaaaaaaaatataaataaataaatataaataaatataaataaata

SEQ ID NO: 12610 - RNA, 85 nt, synthetic construct
  source 1..85: mol_type = other RNA
aaaaaaaaaaaaaaaaaaaaaaaaaaaaaaaaaaaataaaaaaaataaatataaataaataaatataaataaatataaataaata

SEQ ID NO: 12611 - RNA, 85 nt, synthetic construct
  source 1..85: mol_type = other RNA
aaaaaaaaaaaaaaaaaaaaaaaaaaaaaaaaaaaataaaataaataaatataaataaataaatataaataaatataaataaata

SEQ ID NO: 12612 - RNA, 85 nt, synthetic construct
  source 1..85: mol_type = other RNA
aaataaataaataaataaaaaaaaaaaaaaaaaaaaaaaaaaaaaaaaaaataaataaatataaataaatataaaaaaaaaaata

SEQ ID NO: 12613 - RNA, 85 nt, synthetic construct
  source 1..85: mol_type = other RNA
aaataaataaataaataaaaaaaaaaaaaaaaaaaaaaaaaaaaaaaaaaataaataaatataaataaatataaataaaaaaata

SEQ ID NO: 12614 - RNA, 85 nt, synthetic construct
  source 1..85: mol_type = other RNA
aaaaaaaatataaatataaataaatataaataaaaaaaaaaaaaaaaaaaaaaaaaaaaaaaaaaaaaaaaataaataaatataa

SEQ ID NO: 12615 - RNA, 85 nt, synthetic construct
  source 1..85: mol_type = other RNA
aaaaaaaaaataaatataaataaatataaataaaaaaaaaaaaaaaaaaaaaaaaaaaaaaaaaaatataaataaataaatataa

SEQ ID NO: 12616 - RNA, 85 nt, synthetic construct
  source 1..85: mol_type = other RNA
aaaaaataaataaatataaataaatataaataaaaaaaaaaaaaaaaaaaaaaaaaaaaaaaaaaatataaataaataaatataa

SEQ ID NO: 12617 - RNA, 85 nt, synthetic construct
  source 1..85: mol_type = other RNA
aaaaaaaaaaaaaaatataaatataaataaataaataataaataaaaaaaaaaaaaaaaaaaaaaaaaaaaaaaaaataaatata

SEQ ID NO: 12618 - RNA, 85 nt, synthetic construct
  source 1..85: mol_type = other RNA
aaaaaaaaaaaaaaatataaatataaataaataaataataaataaaaaaaaaaaaaaaaaaaaaaaaaaaaaataaataaatata

SEQ ID NO: 12619 - RNA, 85 nt, synthetic construct
  source 1..85: mol_type = other RNA
aaaaaaaaaaataaatataaatataaataaataaataataaataaaaaaaaaaaaaaaaaaaaaaaaaaaaaaaaaataaatata

SEQ ID NO: 12620 - RNA, 85 nt, synthetic construct
  source 1..85: mol_type = other RNA
aaaaaaaaaaaaaaaaaaaataaaaaaaaaaaaaaaaaaaaaaaaaaaaaaaaaataaaaaaaataaataaaaaaaaaaaatata

SEQ ID NO: 12621 - RNA, 85 nt, synthetic construct
  source 1..85: mol_type = other RNA
aaaaaaaaaaataaatataaatataaataaataaataataaataaaaaaaaaaaaaaaaaaaaaaaaaaaaaataaataaatata

SEQ ID NO: 12622 - RNA, 85 nt, synthetic construct
  source 1..85: mol_type = other RNA
aaaaaaataaataaatataaatataaataaataaataataaataaaaaaaaaaaaaaaaaaaaaaaaaaaaaaaaaataaatata

SEQ ID NO: 12623 - RNA, 85 nt, synthetic construct
  source 1..85: mol_type = other RNA
aaaaaaataaataaatataaatataaataaataaataataaataaaaaaaaaaaaaaaaaaaaaaaaaaaaaataaataaatata

SEQ ID NO: 12624 - RNA, 85 nt, synthetic construct
  source 1..85: mol_type = other RNA
aaaaaaaaaaaaaaaaaaaaaaaaaaaataaataaaaaaaaaaaataaaaaaaataaataaataaataaaaaaaaaaaaaatata

SEQ ID NO: 12625 - RNA, 85 nt, synthetic construct
  source 1..85: mol_type = other RNA
aaaaaaaatataaatataaataaatataaataaaaaaaaaaaaaaaaaaaaaaaaaaaaaaaaaaaaaaaaataaatataaatat

SEQ ID NO: 12626 - RNA, 85 nt, synthetic construct
  source 1..85: mol_type = other RNA
aaataaaaaaaaaaaaaaaaatataaataaataaataataaataaaaaaaaaaaaaaaaaaaaaaaaaaaaaaaaaataaatata

SEQ ID NO: 12627 - RNA, 85 nt, synthetic construct
  source 1..85: mol_type = other RNA
aaaaaaaaaaaaaaaaaaaaaaaaaaaataaataaaaaaaaaaaataaaataaataaataaataaataaaaaaaaaaaaaatata

SEQ ID NO: 12628 - RNA, 85 nt, synthetic construct
  source 1..85: mol_type = other RNA
aaaaaaaaaataaatataaataaatataaataaaaaaaaaaaaaaaaaaaaaaaaaaaaaaaaaaatataaataaatataaatat

SEQ ID NO: 12629 - RNA, 85 nt, synthetic construct
  source 1..85: mol_type = other RNA
aaaaaaaatataaatataaataaatataaataaataaaaaaaaaaaaaaaaaaaaaaaaaaaaaaaaaaaaataaatataaatat

SEQ ID NO: 12630 - RNA, 85 nt, synthetic construct
  source 1..85: mol_type = other RNA
aaaaaaaatataaatataaataaatataaataaaaaaaaaaaaaaaaaaaaaaaaaaaaaaaaaaaaataaataaatataaatat

SEQ ID NO: 12631 - RNA, 85 nt, synthetic construct
  source 1..85: mol_type = other RNA
aaataaaaaaaaaaaaataaatataaataaataaataataaataaaaaaaaaaaaaaaaaaaaaaaaaaaaaaaaaataaatata

SEQ ID NO: 12632 - RNA, 85 nt, synthetic construct
  source 1..85: mol_type = other RNA
aaaaaaaaaataaatataaataaatataaataaaaaaaaaaaaaaaaaaaaaaaaaaaaaaataaatataaataaatataaatat

SEQ ID NO: 12633 - RNA, 85 nt, synthetic construct
  source 1..85: mol_type = other RNA
aaaaaataaataaatataaataaatataaataaaaaaaaaaaaaaaaaaaaaaaaaaaaaaaaaaatataaataaatataaatat

SEQ ID NO: 12634 - RNA, 85 nt, synthetic construct
  source 1..85: mol_type = other RNA
aaaaaaaaaataaatataaataaatataaataaataaaaaaaaaaaaaaaaaaaaaaaaaaaaaaatataaataaatataaatat

SEQ ID NO: 12635 - RNA, 85 nt, synthetic construct
  source 1..85: mol_type = other RNA
aaataaataaaaaaaaataaatataaataaataaataataaataaaaaaaaaaaaaaaaaaaaaaaaaaaaaaaaaataaatata

SEQ ID NO: 12636 - RNA, 85 nt, synthetic construct
  source 1..85: mol_type = other RNA
aaataaaaaaaaaaaaataaatataaataaataaataataaataaaaaaaaaaaaaaaaaaaaaaaaaaaaaataaataaatata

SEQ ID NO: 12637 - RNA, 85 nt, synthetic construct
  source 1..85: mol_type = other RNA
aaataaataaataaaaaaaaatataaataaataaataataaataaaaaaaaaaaaaaaaaaaaaaaaaaaaaaaaaataaatata

SEQ ID NO: 12638 - RNA, 85 nt, synthetic construct
  source 1..85: mol_type = other RNA
aaaaaataaataaatataaataaatataaataaaaaaaaaaaaaaaaaaaaaaaaaaaaaaataaatataaataaatataaatat

SEQ ID NO: 12639 - RNA, 85 nt, synthetic construct
  source 1..85: mol_type = other RNA
aaataaataaataaaaataaatataaataaataaataataaataaaaaaaaaaaaaaaaaaaaaaaaaaaaaaaaaataaatata

SEQ ID NO: 12640 - RNA, 85 nt, synthetic construct
  source 1..85: mol_type = other RNA
aaataaataaaaaaaaataaatataaataaataaataataaataaaaaaaaaaaaaaaaaaaaaaaaaaaaaataaataaatata

SEQ ID NO: 12641 - RNA, 85 nt, synthetic construct
  source 1..85: mol_type = other RNA
aaataaataaataaatataaaaataaataaataaataataaataaaaaaaaaaaaaaaaaaaaaaaaaaaaaaaaaataaatata

SEQ ID NO: 12642 - RNA, 85 nt, synthetic construct
  source 1..85: mol_type = other RNA
aaataaataaataaataaaaatataaataaataaataataaataaaaaaaaaaaaaaaaaaaaaaaaaaaaaaaaaataaatata

SEQ ID NO: 12643 - RNA, 85 nt, synthetic construct
  source 1..85: mol_type = other RNA
aaaaaataaataaatataaataaatataaataaataaaaaaaaaaaaaaaaaaaaaaaaaaataaatataaataaatataaatat

SEQ ID NO: 12644 - RNA, 85 nt, synthetic construct
  source 1..85: mol_type = other RNA
aaataaataaataaataaaaatataaataaataaataataaataaaaaaaaaaaaaaaaaaaaaaaaaaaaaataaataaatata

SEQ ID NO: 12645 - RNA, 85 nt, synthetic construct
  source 1..85: mol_type = other RNA
aaataaataaataaatataaaaataaataaataaataataaataaaaaaaaaaaaaaaaaaaaaaaaaaaaaataaataaatata

SEQ ID NO: 12646 - RNA, 86 nt, synthetic construct
  source 1..86: mol_type = other RNA
aaaaaaaaaaaaaaaaaaaaaaaaaaaaaaaaaataaaaaaaaaaaaaaaaaaaaaaaaaaaaaaaaaaaaaataaatataaataa

SEQ ID NO: 12647 - RNA, 86 nt, synthetic construct
  source 1..86: mol_type = other RNA
aaaaaaaaaaaaaaaaaaaaaaaaaaaaaaaaaataaataaaaaaaaaaaaaaaaaaaaaaaaaaaaaaaaaataaatataaataa

SEQ ID NO: 12648 - RNA, 86 nt, synthetic construct
  source 1..86: mol_type = other RNA
aaaaaaaaaaaaataaataaataaaaaaaaaaaaaaaaaaaaaaaaaaaaaaaaaaaaaaaaaaataaataaatataaataaatat

SEQ ID NO: 12649 - RNA, 86 nt, synthetic construct
  source 1..86: mol_type = other RNA
aaaaaaaaaaaaaaaaaaaaaaaaaaaaaaaatataaaaaaaaaaaaaaaaaaaaaaaaaaaaaaaaaaaaaataaatataaataa

SEQ ID NO: 12650 - RNA, 86 nt, synthetic construct
  source 1..86: mol_type = other RNA
aaaaaaaaaaaataaaaaaaaaaaaaaaaaaaaaaaaataaaaaaaaaaaaaaaaaaaaaaaaaaaaatataaataaataaatata

SEQ ID NO: 12651 - RNA, 86 nt, synthetic construct
  source 1..86: mol_type = other RNA
aaaaaaaaaaaaaaaaaaaaaaaaaaaaaaaaaataaaaaaaaaaaaaaaaaaaaaaaaaaaaaaaaaaaaaataaaaataaataa

SEQ ID NO: 12652 - RNA, 86 nt, synthetic construct
  source 1..86: mol_type = other RNA
aaaaaaaaaaaaaaaaaaaaaaaaaaaaaaaaaataaaaaaaaaaaaaaaaaaaaaaaaaaaaaaaaaaaaaataaataaaaataa

SEQ ID NO: 12653 - RNA, 86 nt, synthetic construct
  source 1..86: mol_type = other RNA
aaataaataaataaataaaaaaaaaaaaaaaaaaaaaaaaaaaaaaaaaaaaaaaaaaaaaaaataaaaaaaaataaatataaata

SEQ ID NO: 12654 - RNA, 86 nt, synthetic construct
  source 1..86: mol_type = other RNA
aaaaaaaaaaaaaaaaaaaaaaataaaaaaaaaaaaaaaaaaaaaaaaaaaaaaaaaaaaaaaaaaaaaaaataaatatataaata

SEQ ID NO: 12655 - RNA, 86 nt, synthetic construct
  source 1..86: mol_type = other RNA
aaaaaaaaaaaaaaaaaaaaaaataaaaaaaaaaaaaaaaaaaaaaaaaaaaaaaaaaaaaaaaaaaataaataaatatataaata

SEQ ID NO: 12656 - RNA, 86 nt, synthetic construct
  source 1..86: mol_type = other RNA
aaaaaaaaaaaaataaataaataaaaaaaaaaaaaaaaaaaaaaaaaaaaaaaaaaaaaaaaaaataaataaaaataaataaatat

SEQ ID NO: 12657 - RNA, 86 nt, synthetic construct
  source 1..86: mol_type = other RNA
aaatataaataaaaaaaaaaaaaaaaaaaaaaaaaaaaaataaataaataaataaatataaataaataaaaaaaaaaaaaaaataa

SEQ ID NO: 12658 - RNA, 86 nt, synthetic construct
  source 1..86: mol_type = other RNA
aaatataaataaataaaaaaaaaaaaaaaaaaaaaaaaaataaataaataaataaatataaataaataaaaaaaaaaaaaaaataa

SEQ ID NO: 12659 - RNA, 86 nt, synthetic construct
  source 1..86: mol_type = other RNA
aaatataaataaataaaaaaaaaaaaaaaaaaaaaaaaaataaataaataaataaataaatataaataaaaaaaaaaaaaaaataa

SEQ ID NO: 12660 - RNA, 86 nt, synthetic construct
  source 1..86: mol_type = other RNA
aaatataaataaataaaaaaaaaaaaaaaaaaaaaataaataaataaataaataaatataaataaataaaaaaaaaaaaaaaataa

SEQ ID NO: 12661 - RNA, 86 nt, synthetic construct
  source 1..86: mol_type = other RNA
aaatataaataaataaataaaaaaaaaaaaaaaaaaaaaataaataaataaataaatataaataaataaaaaaaaaaaaaaaataa

SEQ ID NO: 12662 - RNA, 86 nt, synthetic construct
  source 1..86: mol_type = other RNA
aaatataaataaataaaaaaaaaaaaaaaaaaaaaataaataaataaataaataaataaatataaataaaaaaaaaaaaaaaataa

SEQ ID NO: 12663 - RNA, 86 nt, synthetic construct
  source 1..86: mol_type = other RNA
aaatataaataaataaataaaaaaaaaaaaaaaaaaaaaataaataaataaataaataaatataaataaaaaaaaaaaaaaaataa

SEQ ID NO: 12664 - RNA, 86 nt, synthetic construct
  source 1..86: mol_type = other RNA
aaatataaataaataaataaataaaaaaaaaaaaaaaaaataaataaataaataaatataaataaataaaaaaaaaaaaaaaataa

SEQ ID NO: 12665 - RNA, 86 nt, synthetic construct
  source 1..86: mol_type = other RNA
aaatataaataaataaataaataaaaaaaaaaaaaaaaaataaataaataaataaataaatataaataaaaaaaaaaaaaaaataa

SEQ ID NO: 12666 - RNA, 86 nt, synthetic construct
  source 1..86: mol_type = other RNA
aaatataaataaataaaaaaaaaaaaaaaaaaaaaataaataaataaataaataaatataaataaataaataaaaaaaaaaaataa

SEQ ID NO: 12667 - RNA, 86 nt, synthetic construct
  source 1..86: mol_type = other RNA
aaatataaataaataaaaaaaaaaaaaaaaaataaataaataaataaataaataaatataaataaataaaaaaaaaaaaaaaataa

SEQ ID NO: 12668 - RNA, 86 nt, synthetic construct
  source 1..86: mol_type = other RNA
aaatataaataaataaataaaaaaaaaaaaaaaaaataaataaataaataaataaatataaataaataaaaaaaaaaaaaaaataa

SEQ ID NO: 12669 - RNA, 86 nt, synthetic construct
  source 1..86: mol_type = other RNA
aaatataaataaataaataaaaaaaaaaaaaaaaaataaataaataaataaataaataaatataaataaaaaaaaaaaaaaaataa

SEQ ID NO: 12670 - RNA, 86 nt, synthetic construct
  source 1..86: mol_type = other RNA
aaatataaataaataaaaaaaaaaaaaaaaaaaaaaaaaataaataaataaataaatataaataaataaaaaaaaaaaaaaataaa

SEQ ID NO: 12671 - RNA, 86 nt, synthetic construct
  source 1..86: mol_type = other RNA
aaatataaataaataaaaaaaaaaaaaaaaaaaaaaaaaataaataaataaataaataaatataaataaaaaaaaaaaaaaataaa

SEQ ID NO: 12672 - RNA, 86 nt, synthetic construct
  source 1..86: mol_type = other RNA
aaatataaataaataaataaataaaaaaaaaaaaaataaataaataaataaataaatataaataaataaaaaaaaaaaaaaaataa

SEQ ID NO: 12673 - RNA, 86 nt, synthetic construct
  source 1..86: mol_type = other RNA
aaatataaataaataaataaataaaaaaaaaaaaaataaataaataaataaataaataaatataaataaaaaaaaaaaaaaaataa

SEQ ID NO: 12674 - RNA, 86 nt, synthetic construct
  source 1..86: mol_type = other RNA
aaatataaataaataaataaataaaaaaaaaaaaaaaaaataaataaataaataaatataaataaataaataaaaaaaaaaaataa

SEQ ID NO: 12675 - RNA, 86 nt, synthetic construct
  source 1..86: mol_type = other RNA
aaatataaataaataaataaataaaaaaaaaaaaaaaaaataaataaataaataaataaatataaataaataaaaaaaaaaaataa

SEQ ID NO: 12676 - RNA, 86 nt, synthetic construct
  source 1..86: mol_type = other RNA
aaatataaataaataaataaaaaaaaaaaaaaaaaataaataaataaataaataaatataaataaataaataaaaaaaaaaaataa

SEQ ID NO: 12677 - RNA, 86 nt, synthetic construct
  source 1..86: mol_type = other RNA
aaatataaataaataaaaaaaaaaaaaaaaaaaaaataaataaataaataaataaatataaataaataaaaaaaaaaaaaaataaa

SEQ ID NO: 12678 - RNA, 86 nt, synthetic construct
  source 1..86: mol_type = other RNA
aaatataaataaataaataaataaaaaaaaaaaaaataaataaataaataaataaatataaataaataaataaaaaaaaaaaataa

SEQ ID NO: 12679 - RNA, 86 nt, synthetic construct
  source 1..86: mol_type = other RNA
aaatataaataaataaataaataaaaaaaaaataaataaataaataaataaataaatataaataaataaaaaaaaaaaaaaaataa

SEQ ID NO: 12680 - RNA, 86 nt, synthetic construct
  source 1..86: mol_type = other RNA
aaatataaataaataaataaataaaaaaaaaaaaaataaataaataaataaataaataaatataaataaataaaaaaaaaaaataa

SEQ ID NO: 12681 - RNA, 86 nt, synthetic construct
  source 1..86: mol_type = other RNA
aaatataaataaataaataaataaaaaaaaaataaataaataaataaataaataaataaatataaataaaaaaaaaaaaaaaataa

SEQ ID NO: 12682 - RNA, 86 nt, synthetic construct
  source 1..86: mol_type = other RNA
aaatataaataaataaataaataaaaaaaaaaaaaaaaaataaataaataaataaatataaataaataaaaaaaaaaaaaaataaa

SEQ ID NO: 12683 - RNA, 86 nt, synthetic construct
  source 1..86: mol_type = other RNA
aaatataaataaataaaaaaaaaaaaaaaaaataaataaataaataaataaataaatataaataaataaaaaaaaaaaaaaataaa

SEQ ID NO: 12684 - RNA, 86 nt, synthetic construct
  source 1..86: mol_type = other RNA
aaatataaataaataaataaataaaaaaaaaaaaaaaaaataaataaataaataaataaatataaataaaaaaaaaaaaaaataaa

SEQ ID NO: 12685 - RNA, 86 nt, synthetic construct
  source 1..86: mol_type = other RNA
aaatataaataaataaataaataaataaaaaaaaaataaataaataaataaataaatataaataaataaataaaaaaaaaaaataa

SEQ ID NO: 12686 - RNA, 86 nt, synthetic construct
  source 1..86: mol_type = other RNA
aaatataaataaataaataaataaaaaataaataaataaataaataaataaataaatataaataaataaaaaaaaaaaaaaaataa

SEQ ID NO: 12687 - RNA, 86 nt, synthetic construct
  source 1..86: mol_type = other RNA
aaatataaataaataaataaataaaaaaaaaataaataaataaataaataaataaatataaataaataaataaaaaaaaaaaataa

SEQ ID NO: 12688 - RNA, 86 nt, synthetic construct
  source 1..86: mol_type = other RNA
aaatataaataaataaataaataaaaaaaaaataaataaataaataaataaataaataaatataaataaataaaaaaaaaaaataa

SEQ ID NO: 12689 - RNA, 86 nt, synthetic construct
  source 1..86: mol_type = other RNA
aaatataaataaataaataaataaaaaaaaaaaaaataaataaataaataaataaatataaataaataaaaaaaaaaaaaaataaa

SEQ ID NO: 12690 - RNA, 86 nt, synthetic construct
  source 1..86: mol_type = other RNA
aaatataaataaataaataaataaaaaaaaaaaaaataaataaataaataaataaataaatataaataaaaaaaaaaaaaaataaa

SEQ ID NO: 12691 - RNA, 86 nt, synthetic construct
  source 1..86: mol_type = other RNA
aaatataaataaataaataaataaaaaaaaaataaataaataaataaataaataaatataaataaataaaaaaaaaaaaaaataaa

SEQ ID NO: 12692 - RNA, 86 nt, synthetic construct
  source 1..86: mol_type = other RNA
aaatataaataaataaataaataaaaaaaaaaaaaataaataaataaataaataaatataaataaataaataaaaaaaaaaataaa

SEQ ID NO: 12693 - RNA, 86 nt, synthetic construct
  source 1..86: mol_type = other RNA
aaatataaataaataaataaataaaaaataaataaataaataaataaataaataaatataaataaataaaaaaaaaaaaaaataaa

SEQ ID NO: 12694 - RNA, 86 nt, synthetic construct
  source 1..86: mol_type = other RNA
aaaaaaaaaaaaaaataaatataaataaataaataaataaatataaataaataaaataaaaaaaaaaaaaaaaaaaaaaaaatata

SEQ ID NO: 12695 - RNA, 86 nt, synthetic construct
  source 1..86: mol_type = other RNA
aaaaaaaaaaaaaaaaaaaaaaaaaaaaaaaaaataaaaaaaaaaaaaaaaaaaaaaataaaaaaaaaaaaaataaatataaataa

SEQ ID NO: 12696 - RNA, 86 nt, synthetic construct
  source 1..86: mol_type = other RNA
aaaaaaaaaaaaaaaaaaaaaaaaaaaaaaaaaataaaaaaaaaaaaaaaaaaaaataaaaaaaaaaaaaaaataaatataaataa

SEQ ID NO: 12697 - RNA, 86 nt, synthetic construct
  source 1..86: mol_type = other RNA
aaaaaaaaaaaaaaaaaaaaaaaataaaaaaaaataaaaaaaaaaaaaaaaaaaaaaaaaaaaaaaaaaaaaataaatataaataa

SEQ ID NO: 12698 - RNA, 86 nt, synthetic construct
  source 1..86: mol_type = other RNA
aaaaaaaaaaaaaaaaaaaaaaaaaaaaaaaaaataaaaaaaaaaaaaataaaaaaaaaaaaaaaaaaaaaaataaatataaataa

SEQ ID NO: 12699 - RNA, 86 nt, synthetic construct
  source 1..86: mol_type = other RNA
aaaaaaaaaaataaaaaaaaaaaaaaaaaaaaaataaaaaaaaaaaaaaaaaaaaaaaaaaaaaaaaaaaaaataaatataaataa

SEQ ID NO: 12700 - RNA, 86 nt, synthetic construct
  source 1..86: mol_type = other RNA
aaaaaaaaaaaaaaaaaaaaaaaaaaaaaaaaaataaaaaaaaaaaaaaaaaaaaaaaaaaaataaaaaaaaataaatataaataa

SEQ ID NO: 12701 - RNA, 86 nt, synthetic construct
  source 1..86: mol_type = other RNA
aaaaaaaaaaaaaaaaaaaaataaaaaaaaaaaataaaaaaaaaaaaaaaaaaaaaaaaaaaaaaaaaaaaaataaatataaataa

SEQ ID NO: 12702 - RNA, 86 nt, synthetic construct
  source 1..86: mol_type = other RNA
aaaaaaaaaaaaaaaaaaaaaaaaaaaaaaaaaataaaaaaaataaaaaaaaaaaaaaaaaaaaaaaaaaaaataaatataaataa

SEQ ID NO: 12703 - RNA, 86 nt, synthetic construct
  source 1..86: mol_type = other RNA
aaaaaaaaaaaaaaaaaaaaaaaaataaaaaaaataaaaaaaaaaaaaaaaaaaaaaaaaaaaaaaaaaaaaataaatataaataa

SEQ ID NO: 12704 - RNA, 86 nt, synthetic construct
  source 1..86: mol_type = other RNA
aaaaaaaaaaaaataaaaaaaaaaaaaaaaaaaataaaaaaaaaaaaaaaaaaaaaaaaaaaaaaaaaaaaaataaatataaataa

SEQ ID NO: 12705 - RNA, 86 nt, synthetic construct
  source 1..86: mol_type = other RNA
aaaaaaaaaaaaaaaaaaaaaaaaaaaaaaaaaataaaaaaaaaaaaaaaaaataaaaaaaaaaaaaaaaaaataaatataaataa

SEQ ID NO: 12706 - RNA, 86 nt, synthetic construct
  source 1..86: mol_type = other RNA
aaaaataaataaaaaaaaaaaaaaaaaaaaaaaaaaaaaataaataaataaataaatataaataaataaaaaaaaaaaaaaaataa

SEQ ID NO: 12707 - RNA, 86 nt, synthetic construct
  source 1..86: mol_type = other RNA
aaataaataaataaataaaaaaaaaaaaaaaaaaaaaaaaaaaaaaaaaaaaaaaaaaaaaaaatataaaaaaataaatataaata

SEQ ID NO: 12708 - RNA, 86 nt, synthetic construct
  source 1..86: mol_type = other RNA
aaataaataaataaataaaaaaaaaaaaaaaaaaaaaaaaaaaaaaaaaaaaaaaaaaaataaatataaaaaaataaatataaata

SEQ ID NO: 12709 - RNA, 86 nt, synthetic construct
  source 1..86: mol_type = other RNA
aaataaataaataaataaaaaaaaaaaaaaaaaaaaaaaaaaaaaaaaaaaaaaaataaataaatataaaaaaataaatataaata

SEQ ID NO: 12710 - RNA, 86 nt, synthetic construct
  source 1..86: mol_type = other RNA
aaataaataaataaataaaaaaaaaaaaaaaaaaaaaaaaaaaaaaaaaaaataaataaataaatataaaaaaataaatataaata

SEQ ID NO: 12711 - RNA, 86 nt, synthetic construct
  source 1..86: mol_type = other RNA
aaaaaaaaaaaaataaataaataaaaaaaaaaaaaaaaaaaaaaaaaaaaaaaaaaaaaaaaaaataaataaatataaaaaaatat

SEQ ID NO: 12712 - RNA, 86 nt, synthetic construct
  source 1..86: mol_type = other RNA
aaataaaaaaaaaaaaaaaaaaataaaaaaaaaaaaaaaaaaaaaaaaaaaaaaaaaaaaaaaaaaaataaataaatatataaata

SEQ ID NO: 12713 - RNA, 86 nt, synthetic construct
  source 1..86: mol_type = other RNA
aaaaaaaaaaaaataaataaataaaaaaaaaaaaaaaataaaaaaaaaaaaaaaaaaaaaaaaaataaataaatataaataaatat

SEQ ID NO: 12714 - RNA, 86 nt, synthetic construct
  source 1..86: mol_type = other RNA
aaaaaaaaaaaaataaataaataaaaaaaaaaaaaaaaaaaaaaataaaaaaaaaaaaaaaaaaataaataaatataaataaatat

SEQ ID NO: 12715 - RNA, 86 nt, synthetic construct
  source 1..86: mol_type = other RNA
aaaaaaaaaaaaataaataaataaaaaaaaaaaaaaaaaaaaaaaaaataaaaaaaaaaaaaaaataaataaatataaataaatat

SEQ ID NO: 12716 - RNA, 86 nt, synthetic construct
  source 1..86: mol_type = other RNA
aaaaaaaaaaaaataaataaataaaaaaaaaaaaaaaaaaaaaaaaaaaaaaaaaaaaataaaaataaataaatataaataaatat

SEQ ID NO: 12717 - RNA, 86 nt, synthetic construct
  source 1..86: mol_type = other RNA
aaaaaaaaaaaaataaataaataaaaaaaaaaaaaaaaaaaaaaaaaaaaataaaaaaaaaaaaataaataaatataaataaatat

SEQ ID NO: 12718 - RNA, 86 nt, synthetic construct
  source 1..86: mol_type = other RNA
aaaaaaaaaaaaataaataaataaaaaaaaaaaaaaaaaaaaaaaaaaaaaaaaataaaaaaaaataaataaatataaataaatat

SEQ ID NO: 12719 - RNA, 86 nt, synthetic construct
  source 1..86: mol_type = other RNA
aaaaaaaaaaaaataaataaataaaaaaaaaaaaaaaaaaaaaaaaaaaaaaaaaataaaaaaaataaataaatataaataaatat

SEQ ID NO: 12720 - RNA, 86 nt, synthetic construct
  source 1..86: mol_type = other RNA
aaaaaaaaaaaaataaataaataaaaaaaaaaaaaaaaaaaaaaaaaaaaaaaaaaaaaataaaataaataaatataaataaatat

SEQ ID NO: 12721 - RNA, 86 nt, synthetic construct
  source 1..86: mol_type = other RNA
aaaaaaaaaaaaataaataaataaaaaaaaaaaaaaaaaaaaaaaaaaaaaaaataaaaaaaaaataaataaatataaataaatat

SEQ ID NO: 12722 - RNA, 86 nt, synthetic construct
  source 1..86: mol_type = other RNA
aaaaaaaaaaaaaaaaaaaaaaaaaaaaaaaaaataaaaaaaaaaaaaaaaaaaaaaaaaaaaaaaaaaaaaataaatataaatac

SEQ ID NO: 12723 - RNA, 86 nt, synthetic construct
  source 1..86: mol_type = other RNA
aaaaaaaaaaaaataaataaataaaaaaaaaaaaaaaataaaaaaaaaaaaaaaaaaaaaataaataaataaatataaataaatat

SEQ ID NO: 12724 - RNA, 86 nt, synthetic construct
  source 1..86: mol_type = other RNA
aaaaaaaaaaaaataaataaataaaaaaaaaaaaaaaaaaaaaaaaaaaaaaaaaaaaaaaaaaataaataaatataaataaatac

SEQ ID NO: 12725 - RNA, 86 nt, synthetic construct
  source 1..86: mol_type = other RNA
aaatataaataaataaataaatataaaaaaaaaaaaaaaataaataaataaataaatataaataaataaaaaaaaaaaaaaaataa

SEQ ID NO: 12726 - RNA, 86 nt, synthetic construct
  source 1..86: mol_type = other RNA
aaatataaataaatataaaaaaaaaaaaaaaataaataaataaataaataaataaatataaataaataaaaaaaaaaaaaaaataa

SEQ ID NO: 12727 - RNA, 86 nt, synthetic construct
  source 1..86: mol_type = other RNA
aaatataaataaataaataaatataaaaaaaaaaaaaaaataaataaataaataaataaatataaataaaaaaaaaaaaaaaataa

SEQ ID NO: 12728 - RNA, 86 nt, synthetic construct
  source 1..86: mol_type = other RNA
aaatataaataaataaataaatataaaaaaaaaaaataaataaataaataaataaatataaataaataaaaaaaaaaaaaaaataa

SEQ ID NO: 12729 - RNA, 86 nt, synthetic construct
  source 1..86: mol_type = other RNA
aaatataaataaataaataaatataaaaaaaaaaaataaataaataaataaataaataaatataaataaaaaaaaaaaaaaaataa

SEQ ID NO: 12730 - RNA, 86 nt, synthetic construct
  source 1..86: mol_type = other RNA
aaatataaataaataaataaatataaaaaaaaaaaaaaaataaataaataaataaatataaataaataaataaaaaaaaaaaataa

SEQ ID NO: 12731 - RNA, 86 nt, synthetic construct
  source 1..86: mol_type = other RNA
aaatataaataaatataaaaaaaaaaaaaaaaaaaataaataaataaataaataaatataaataaataaaaaaaaaaaaaaataaa

SEQ ID NO: 12732 - RNA, 86 nt, synthetic construct
  source 1..86: mol_type = other RNA
aaatataaataaataaataaatataaaaaaaataaataaataaataaataaataaatataaataaataaaaaaaaaaaaaaaataa

SEQ ID NO: 12733 - RNA, 86 nt, synthetic construct
  source 1..86: mol_type = other RNA
aaatataaataaataaataaatataaaaaaaaaaaataaataaataaataaataaatataaataaataaataaaaaaaaaaaataa

SEQ ID NO: 12734 - RNA, 86 nt, synthetic construct
  source 1..86: mol_type = other RNA
aaatataaataaataaataaatataaaaaaaaaaaataaataaataaataaataaataaatataaataaataaaaaaaaaaaataa

SEQ ID NO: 12735 - RNA, 86 nt, synthetic construct
  source 1..86: mol_type = other RNA
aaatataaataaataaataaatataaaaaaaaaaaaaaaataaataaataaataaatataaataaataaaaaaaaaaaaaaataaa

SEQ ID NO: 12736 - RNA, 86 nt, synthetic construct
  source 1..86: mol_type = other RNA
aaatataaataaataaataaatataaaaaaaaaaaaaaaataaataaataaataaataaatataaataaaaaaaaaaaaaaataaa

SEQ ID NO: 12737 - RNA, 86 nt, synthetic construct
  source 1..86: mol_type = other RNA
aaatataaataaataaataaatataaaaaaaataaataaataaataaataaataaatataaataaataaataaaaaaaaaaaataa

SEQ ID NO: 12738 - RNA, 86 nt, synthetic construct
  source 1..86: mol_type = other RNA
aaatataaataaataaataaatataaaataaataaataaataaataaataaataaataaatataaataaaaaaaaaaaaaaaataa

SEQ ID NO: 12739 - RNA, 86 nt, synthetic construct
  source 1..86: mol_type = other RNA
aaatataaataaataaataaatataaaaaaaaaaaataaataaataaataaataaatataaataaataaaaaaaaaaaaaaataaa

SEQ ID NO: 12740 - RNA, 86 nt, synthetic construct
  source 1..86: mol_type = other RNA
aaatataaataaataaataaatataaaaaaaaaaaaaaaataaataaataaataaatataaataaataaataaaaaaaaaaataaa

SEQ ID NO: 12741 - RNA, 86 nt, synthetic construct
  source 1..86: mol_type = other RNA
aaatataaataaatataaaaaaaaaaaataaataaataaataaataaataaataaatataaataaataaaaaaaaaaaaaaataaa

SEQ ID NO: 12742 - RNA, 86 nt, synthetic construct
  source 1..86: mol_type = other RNA
aaatataaataaataaataaatataaaaaaaaaaaataaataaataaataaataaataaatataaataaaaaaaaaaaaaaataaa

SEQ ID NO: 12743 - RNA, 86 nt, synthetic construct
  source 1..86: mol_type = other RNA
aaaaaaaaaaaaaaaaaaataaataaatataaataaataaataaatataaataaatataaataaatataaataaaaaaaaaaatat

SEQ ID NO: 12744 - RNA, 86 nt, synthetic construct
  source 1..86: mol_type = other RNA
aaatataaataaataaataaatataaaaaaaataaataaataaataaataaataaatataaataaataaaaaaaaaaaaaaataaa

SEQ ID NO: 12745 - RNA, 86 nt, synthetic construct
  source 1..86: mol_type = other RNA
aaatataaataaataaataaatataaaaaaaataaataaataaataaataaataaataaatataaataaaaaaaaaaaaaaataaa

SEQ ID NO: 12746 - RNA, 86 nt, synthetic construct
  source 1..86: mol_type = other RNA
aaatataaataaataaataaataaaaaaaaaaaaaataaataaataaataaataaataaatataaataaatataaaaaaaaataaa

SEQ ID NO: 12747 - RNA, 87 nt, synthetic construct
  source 1..87: mol_type = other RNA
aaataaaaaaaaaaaaaaaaaaaaaaaaaaaaaaaaaaaaaaaaaaataaaaaaaaaaaaaaaaaaaaaaaaaaaaaaaaaaatata

SEQ ID NO: 12748 - RNA, 87 nt, synthetic construct
  source 1..87: mol_type = other RNA
aaataaaaaaaaaaaaaaaaaaaaaaaaaaaaaaaaaaaaaaataaataaaaaaaaaaaaaaaaaaaaaaaaaaaaaaaaaaatata

SEQ ID NO: 12749 - RNA, 87 nt, synthetic construct
  source 1..87: mol_type = other RNA
aaataaaaaaaaaaaaaaaaaaaaaaaaaaaaaaaaaaaaaaaaaaataaataaaaaaaaaaaaaaaaaaaaaaaaaaaaaaatata

SEQ ID NO: 12750 - RNA, 87 nt, synthetic construct
  source 1..87: mol_type = other RNA
aaataaaaaaaaaaaaaaaaaaaaaaaaaaaaaaaaaaaaaaataaataaataaaaaaaaaaaaaaaaaaaaaaaaaaaaaaatata

SEQ ID NO: 12751 - RNA, 87 nt, synthetic construct
  source 1..87: mol_type = other RNA
aaatataaaaaaaaaaaaaaaaaaaaaaaaaaaaaaaaaaaaaaaaataaaaaaaaaaaaaaaaaaaaaaaaaaaaaaaaaaatata

SEQ ID NO: 12752 - RNA, 87 nt, synthetic construct
  source 1..87: mol_type = other RNA
aaataaaaaaaaaaaaaaaaaaaaaaaaaaaaaaaaaaaaatataaataaaaaaaaaaaaaaaaaaaaaaaaaaaaaaaaaaatata

SEQ ID NO: 12753 - RNA, 87 nt, synthetic construct
  source 1..87: mol_type = other RNA
aaataaaaaaaaaaaaaaaaaaaaaaaaaaaaaaaaaaaaataaatataaaaaaaaaaaaaaaaaaaaaaaaaaaaaaaaaaatata

SEQ ID NO: 12754 - RNA, 87 nt, synthetic construct
  source 1..87: mol_type = other RNA
aaatataaaaaaaaaaaaaaaaaaaaaaaaaaaaaaaaaaaaaaaaataaataaaaaaaaaaaaaaaaaaaaaaaaaaaaaaatata

SEQ ID NO: 12755 - RNA, 87 nt, synthetic construct
  source 1..87: mol_type = other RNA
aaatataaataaaaaaaaaaaaaaaaaaaaaaaaaaaaaaaaaaaaataaaaaaaaaaaaaaaaaaaaaaaaaaaaaaaaaaatata

SEQ ID NO: 12756 - RNA, 87 nt, synthetic construct
  source 1..87: mol_type = other RNA
aaatataaaaaaaaaaaaaaaaaaaaaaaaaaaaaaaaaaaaataaataaaaaaaaaaaaaaaaaaaaaaaaaaaaaaaaaaatata

SEQ ID NO: 12757 - RNA, 87 nt, synthetic construct
  source 1..87: mol_type = other RNA
aaatataaataaaaaaaaaaaaaaaaaaaaaaaaaaaaaaaaataaataaaaaaaaaaaaaaaaaaaaaaaaaaaaaaaaaaatata

SEQ ID NO: 12758 - RNA, 87 nt, synthetic construct
  source 1..87: mol_type = other RNA
aaataaaaaaaaaaaaaaaaaaaaaaaaaaaaaaaaaaaaatataaataaataaaaaaaaaaaaaaaaaaaaaaaaaaaaaaatata

SEQ ID NO: 12759 - RNA, 87 nt, synthetic construct
  source 1..87: mol_type = other RNA
aaatataaataaaaaaaaaaaaaaaaaaaaaaaaaaaaaaaaaaaaataaataaaaaaaaaaaaaaaaaaaaaaaaaaaaaaatata

SEQ ID NO: 12760 - RNA, 87 nt, synthetic construct
  source 1..87: mol_type = other RNA
aaataaaaaaaaaaaaaaaaaaaaaaaaaaaaaaaaataaatataaataaaaaaaaaaaaaaaaaaaaaaaaaaaaaaaaaaatata

SEQ ID NO: 12761 - RNA, 87 nt, synthetic construct
  source 1..87: mol_type = other RNA
aaatataaaaaaaaaaaaaaaaaaaaaaaaaaaaaaaaaaaaataaataaataaaaaaaaaaaaaaaaaaaaaaaaaaaaaaatata

SEQ ID NO: 12762 - RNA, 87 nt, synthetic construct
  source 1..87: mol_type = other RNA
aaataaaaaaaaaaaaaaaaaaaaaataaatataaataaataaaaaaaaaaaaaaaaaaaaaaaaaaaaaaaaaaaaaaaaaatata

SEQ ID NO: 12763 - RNA, 87 nt, synthetic construct
  source 1..87: mol_type = other RNA
aaatataaataaataaaaaaaaaaaaaaaaaaaaaaaaaaaaataaataaaaaaaaaaaaaaaaaaaaaaaaaaaaaaaaaaatata

SEQ ID NO: 12764 - RNA, 87 nt, synthetic construct
  source 1..87: mol_type = other RNA
aaataaaaaaaaaaaaaaaaaaaaaaaaaaaaaaaaataaatataaataaataaaaaaaaaaaaaaaaaaaaaaaaaaaaaaatata

SEQ ID NO: 12765 - RNA, 87 nt, synthetic construct
  source 1..87: mol_type = other RNA
aaatataaataaaaaaaaaaaaaaaaaaaaaaaaaaaaaaaaataaataaataaaaaaaaaaaaaaaaaaaaaaaaaaaaaaatata

SEQ ID NO: 12766 - RNA, 87 nt, synthetic construct
  source 1..87: mol_type = other RNA
aaatataaataaataaaaaaaaaaaaaaaaaaaaaaaaaaaaaaaaataaataaaaaaaaaaaaaaaaaaaaaaaaaaaaaaatata

SEQ ID NO: 12767 - RNA, 87 nt, synthetic construct
  source 1..87: mol_type = other RNA
aaataaaaaaaaaaaaaaaaaaaaaaaaaaaaaaaaaaaaaaaaaaataaaaaaaaaaaaaaaaaaaaaaaaaaaaaaaaaaataaa

SEQ ID NO: 12768 - RNA, 87 nt, synthetic construct
  source 1..87: mol_type = other RNA
aaataaaaaaaaaaaaaaaaaaaaaaaaaaaaaaaaaaaaaaaaaaataaataaaaaaaaaaaaaaaaaaaaaaaaaaaaaaataaa

SEQ ID NO: 12769 - RNA, 87 nt, synthetic construct
  source 1..87: mol_type = other RNA
aaataaaaaaaaaaaaaaaaaaaaaaaaaaaaaaaaaaaaaaataaataaaaaaaaaaaaaaaaaaaaaaaaaaaaaaaaaaataaa

SEQ ID NO: 12770 - RNA, 87 nt, synthetic construct
  source 1..87: mol_type = other RNA
aaataaaaaaaaaaaaaaaaaaaaaaaaaaaaaaaaaaaaaaaaaaataaaaaaaaaaaaaaaaaaaaaaaaaaaaaaaaaaaaata

SEQ ID NO: 12771 - RNA, 87 nt, synthetic construct
  source 1..87: mol_type = other RNA
aaatataaaaaaaaaaaaaaaaaaaaaaaaaaaaaaaaaaatataaataaaaaaaaaaaaaaaaaaaaaaaaaaaaaaaaaaatata

SEQ ID NO: 12772 - RNA, 87 nt, synthetic construct
  source 1..87: mol_type = other RNA
aaatataaaaaaaaaaaaaaaaaaaaaaaaaaaaaaaaaaataaatataaaaaaaaaaaaaaaaaaaaaaaaaaaaaaaaaaatata

SEQ ID NO: 12773 - RNA, 87 nt, synthetic construct
  source 1..87: mol_type = other RNA
aaataaaaaaaaaaaaaaaaaaaaaaaaaaaaaaaaaaaaaaaaaaataaataaaaaaaaaaaaaaaaaaaaaaaaaaaaaaaaata

SEQ ID NO: 12774 - RNA, 87 nt, synthetic construct
  source 1..87: mol_type = other RNA
aaataaaaaaaaaaaaaaaaaaaaaaaaaaaaaaaaaaaaaaataaataaaaaaaaaaaaaaaaaaaaaaaaaaaaaaaaaaaaata

SEQ ID NO: 12775 - RNA, 87 nt, synthetic construct
  source 1..87: mol_type = other RNA
aaatataaataaaaaaaaaaaaaaaaaaaaaaaaaaaaaaatataaataaaaaaaaaaaaaaaaaaaaaaaaaaaaaaaaaaatata

SEQ ID NO: 12776 - RNA, 87 nt, synthetic construct
  source 1..87: mol_type = other RNA
aaatataaataaaaaaaaaaaaaaaaaaaaaaaaaaaaaaataaatataaaaaaaaaaaaaaaaaaaaaaaaaaaaaaaaaaatata

SEQ ID NO: 12777 - RNA, 87 nt, synthetic construct
  source 1..87: mol_type = other RNA
aaatataaaaaaaaaaaaaaaaaaaaaaaaaaaaaaaaaaatataaataaataaaaaaaaaaaaaaaaaaaaaaaaaaaaaaatata

SEQ ID NO: 12778 - RNA, 87 nt, synthetic construct
  source 1..87: mol_type = other RNA
aaataaaaaaaaaaaaaaaaaaaaaaaaaaaaaaaaaaaaaaataaataaataaaaaaaaaaaaaaaaaaaaaaaaaaaaaaaaata

SEQ ID NO: 12779 - RNA, 87 nt, synthetic construct
  source 1..87: mol_type = other RNA
aaataaaaaaaaaaaaaaaaaaaaaataaatataaataaatataaaaaaaaaaaaaaaaaaaaaaaaaaaaaaaaaaaaaaaatata

SEQ ID NO: 12780 - RNA, 87 nt, synthetic construct
  source 1..87: mol_type = other RNA
aaatataaataaaaaaaaaaaaaaaaaaaaaaaaaaaaaaatataaataaataaaaaaaaaaaaaaaaaaaaaaaaaaaaaaatata

SEQ ID NO: 12781 - RNA, 87 nt, synthetic construct
  source 1..87: mol_type = other RNA
aaatataaataaataaaaaaaaaaaaaaaaaaaaaaaaaaatataaataaaaaaaaaaaaaaaaaaaaaaaaaaaaaaaaaaatata

SEQ ID NO: 12782 - RNA, 87 nt, synthetic construct
  source 1..87: mol_type = other RNA
aaatataaataaaaaaaaaaaaaaaaaaaaaaaaaaataaatataaataaaaaaaaaaaaaaaaaaaaaaaaaaaaaaaaaaatata

SEQ ID NO: 12783 - RNA, 87 nt, synthetic construct
  source 1..87: mol_type = other RNA
aaatataaataaataaaaaaaaaaaaaaaaaaaaaaaaaaataaatataaaaaaaaaaaaaaaaaaaaaaaaaaaaaaaaaaatata

SEQ ID NO: 12784 - RNA, 87 nt, synthetic construct
  source 1..87: mol_type = other RNA
aaatataaataaataaaaaaaaaaaaaaaaaaaaaaaaaaatataaataaataaaaaaaaaaaaaaaaaaaaaaaaaaaaaaatata

SEQ ID NO: 12785 - RNA, 87 nt, synthetic construct
  source 1..87: mol_type = other RNA
aaatataaaaaaaaaaaaaaaaaaaaaaaaaaaaaaaaaaaaaaaaataaataaaaaaaaaaaaaaaaaaaaaaaaaaaaaaataaa

SEQ ID NO: 12786 - RNA, 87 nt, synthetic construct
  source 1..87: mol_type = other RNA
aaataaaaaaaaaaaaaaaaaaaaaaaaaaaaaaaaaaaaatataaataaaaaaaaaaaaaaaaaaaaaaaaaaaaaaaaaaataaa

SEQ ID NO: 12787 - RNA, 87 nt, synthetic construct
  source 1..87: mol_type = other RNA
aaatataaataaaaaaaaaaaaaaaaaaaaaaaaaaaaaaaaataaataaaaaaaaaaaaaaaaaaaaaaaaaaaaaaaaaaataaa

SEQ ID NO: 12788 - RNA, 87 nt, synthetic construct
  source 1..87: mol_type = other RNA
aaataaaaaaaaaaaaaaaaaaaaaaaaaaaaaaaaaaaaatataaataaataaaaaaaaaaaaaaaaaaaaaaaaaaaaaaataaa

SEQ ID NO: 12789 - RNA, 87 nt, synthetic construct
  source 1..87: mol_type = other RNA
aaatataaataaaaaaaaaaaaaaaaaaaaaaaaaaaaaaaaataaataaataaaaaaaaaaaaaaaaaaaaaaaaaaaaaaataaa

SEQ ID NO: 12790 - RNA, 87 nt, synthetic construct
  source 1..87: mol_type = other RNA
aaataaaaaaaaaaaaaaaaaaaaaaaaaaaaaaaaaaaaaaaaaaataaaaaaaaaaaaaaaaaaaaaaaaaataaaaaaaatata

SEQ ID NO: 12791 - RNA, 87 nt, synthetic construct
  source 1..87: mol_type = other RNA
aaataaaaaataaaaaaaaaaaaaaaaaaaaaaaaaaaaaaaaaaaataaaaaaaaaaaaaaaaaaaaaaaaaaaaaaaaaaatata

SEQ ID NO: 12792 - RNA, 87 nt, synthetic construct
  source 1..87: mol_type = other RNA
aaataaaaataaaaaaaaaaaaaaaaaaaaaaaaaaaaaaaaaaaaataaaaaaaaaaaaaaaaaaaaaaaaaaaaaaaaaaatata

SEQ ID NO: 12793 - RNA, 87 nt, synthetic construct
  source 1..87: mol_type = other RNA
aaataaaaaaaaaaaaaaaaaaaaaaaaaaaaaaaaaaaaaaaaaaataaaaaaaaaaaaaataaaaaaaaaaaaaaaaaaaatata

SEQ ID NO: 12794 - RNA, 87 nt, synthetic construct
  source 1..87: mol_type = other RNA
aaataaaaaaaaaaaaaaaaaaaaaaaaaaaaaaaaaaaaaaaaaaataaaaaaaaaaaaaaaaaaaaaataaaaaaaaaaaatata

SEQ ID NO: 12795 - RNA, 87 nt, synthetic construct
  source 1..87: mol_type = other RNA
aaataaaaaaaaaaaaaaaaaaaaaaaaaaaaaaaaataaaaaaaaataaaaaaaaaaaaaaaaaaaaaaaaaaaaaaaaaaatata

SEQ ID NO: 12796 - RNA, 87 nt, synthetic construct
  source 1..87: mol_type = other RNA
aaataaaaaaaaaaaaaaaaaaaaaaataaaaaaaaaaaaaaaaaaataaaaaaaaaaaaaaaaaaaaaaaaaaaaaaaaaaatata

SEQ ID NO: 12797 - RNA, 87 nt, synthetic construct
  source 1..87: mol_type = other RNA
aaataaaaaaataaaaaaaaaaaaaaaaaaaaaaaaaaaaaaaaaaataaaaaaaaaaaaaaaaaaaaaaaaaaaaaaaaaaatata

SEQ ID NO: 12798 - RNA, 87 nt, synthetic construct
  source 1..87: mol_type = other RNA
aaataaaaaaaaaaaaaaaaaaaaaaaaaaaaaaaaaaaaaaaaaaataaaaaaaaaaaaaaaaataaaaaaaaaaaaaaaaatata

SEQ ID NO: 12799 - RNA, 87 nt, synthetic construct
  source 1..87: mol_type = other RNA
aaataaaaaaaaaaaaaaaaaaaaaaaaaaaaaaaaaaaaaaataaataaaaaaaaaaaaaaaaaaaaaaaaaataaaaaaaatata

SEQ ID NO: 12800 - RNA, 87 nt, synthetic construct
  source 1..87: mol_type = other RNA
aaataaaaaataaaaaaaaaaaaaaaaaaaaaaaaaaaaaaaataaataaaaaaaaaaaaaaaaaaaaaaaaaaaaaaaaaaatata

SEQ ID NO: 12801 - RNA, 87 nt, synthetic construct
  source 1..87: mol_type = other RNA
aaataaaaaaaaaaaaaaaaaaaaaaaaaaaaaaaaaaaaaaaaaaataaataaaaaaaaaaaaaaaaaaaaaataaaaaaaatata

SEQ ID NO: 12802 - RNA, 87 nt, synthetic construct
  source 1..87: mol_type = other RNA
aaataaaaaaaaaaaaaaaaaaaaaaaaaaaaaaaaaaaaaaaaaaataaaaaaaaaaaaaaaaaaaaaataaataaaaaaaatata

SEQ ID NO: 12803 - RNA, 87 nt, synthetic construct
  source 1..87: mol_type = other RNA
aaataaaaaaaaaaaaaaaaaaaaaaaaaaaaaaaaaaaaaaaaaaataaataaaaaaaaaaaaaaaaaataaaaaaaaaaaatata

SEQ ID NO: 12804 - RNA, 87 nt, synthetic construct
  source 1..87: mol_type = other RNA
aaataaaaataaaaaaaaaaaaaaaaaaaaaaaaaaaaaaaaataaataaaaaaaaaaaaaaaaaaaaaaaaaaaaaaaaaaatata

SEQ ID NO: 12805 - RNA, 87 nt, synthetic construct
  source 1..87: mol_type = other RNA
aaataaaaaaaaaaaaaaaaaaaaaaaaaaaaaaaaaaaaaaaaaaataaataaaaaaaaaaaaaaaataaaaaaaaaaaaaatata

SEQ ID NO: 12806 - RNA, 87 nt, synthetic construct
  source 1..87: mol_type = other RNA
aaataaaaataaaaaaaaaaaaaaaaaaaaaaaaaaaaaaaaaaaaataaataaaaaaaaaaaaaaaaaaaaaaaaaaaaaaatata

SEQ ID NO: 12807 - RNA, 87 nt, synthetic construct
  source 1..87: mol_type = other RNA
aaataaaaaataaaaaaaaaaaaaaaaaaaaaaaaaaaaaaaaaaaataaataaaaaaaaaaaaaaaaaaaaaaaaaaaaaaatata

SEQ ID NO: 12808 - RNA, 87 nt, synthetic construct
  source 1..87: mol_type = other RNA
aaataaaaaaaaaaaaaaaaaaaaaaaaaaaaaaaaaaaaataaaaataaataaaaaaaaaaaaaaaaaaaaaaaaaaaaaaatata

SEQ ID NO: 12809 - RNA, 87 nt, synthetic construct
  source 1..87: mol_type = other RNA
aaataaaaaaaaaaaaaaaaaaaaaaaaaaaaaaaaaaaaaaaaaaataaataaaaaaaaaataaaaaaaaaaaaaaaaaaaatata

SEQ ID NO: 12810 - RNA, 87 nt, synthetic construct
  source 1..87: mol_type = other RNA
aaataaaaaaaaaaaaaaaaaaaaaaaaaaaaaaaaaaaaaaataaataaaaaaaaaaaaaaaaaaaaaataaaaaaaaaaaatata

SEQ ID NO: 12811 - RNA, 87 nt, synthetic construct
  source 1..87: mol_type = other RNA
aaataaaaaaaaaaaaaaaaaaaaaaaaaaaaaaaaataaataaaaataaaaaaaaaaaaaaaaaaaaaaaaaaaaaaaaaaatata

SEQ ID NO: 12812 - RNA, 87 nt, synthetic construct
  source 1..87: mol_type = other RNA
aaaaaaaaaaaaaaataaataaataaataaatataaataaataaaaaaaaaaaaaaaaaaaaaaaaaaaaaaaaaaaataaatatat

SEQ ID NO: 12813 - RNA, 87 nt, synthetic construct
  source 1..87: mol_type = other RNA
aaataaaaaaaaaaaaaaaaaaaaaaaaaaaaaaaaaaaaaaaaaaataaaaaaaaaaaaaaaaaataaataaataaaaaaaatata

SEQ ID NO: 12814 - RNA, 87 nt, synthetic construct
  source 1..87: mol_type = other RNA
aaataaaaaaaaaaaaaaaaaaaaaaaaaaaaaaaaaaaaaaaaaaataaataaaaaaaaaaaaaaaaaataaataaaaaaaatata

SEQ ID NO: 12815 - RNA, 87 nt, synthetic construct
  source 1..87: mol_type = other RNA
aaataaaaaaaaaaaaaaaaaaaaaaaaaaaaaaaaaaaaaaataaataaataaaaaaaaaaaaaaaataaaaaaaaaaaaaatata

SEQ ID NO: 12816 - RNA, 87 nt, synthetic construct
  source 1..87: mol_type = other RNA
aaataaaaaaaaaaaaaaaaaaaaaaaaaaaaaaaaaaaaaaataaataaaaaaaaaaaaaaaaaaaaaataaataaaaaaaatata

SEQ ID NO: 12817 - RNA, 87 nt, synthetic construct
  source 1..87: mol_type = other RNA
aaataaaaaaaaaaaaaaaaaaaaaaaaaaaaaaaaaaaaaaataaataaataaaaaaaaaaaaaaaaaaaaaataaaaaaaatata

SEQ ID NO: 12818 - RNA, 87 nt, synthetic construct
  source 1..87: mol_type = other RNA
aaataaaaataaaaaaaaaaaaaaaaaaaaaaaaaaaaaaaaataaataaataaaaaaaaaaaaaaaaaaaaaaaaaaaaaaatata

SEQ ID NO: 12819 - RNA, 87 nt, synthetic construct
  source 1..87: mol_type = other RNA
aaataaaaaaaaaaaaaaaaaaaaaaaaaaaaaaaaaaaaaaataaataaataaaaaaaaaaaaaataaaaaaaaaaaaaaaatata

SEQ ID NO: 12820 - RNA, 87 nt, synthetic construct
  source 1..87: mol_type = other RNA
aaataaaaaaaaaaaaaaaaaaaaaaaaaaaaaaaaaaaaaaataaataaaaaaaaaaaaaaaaaataaataaaaaaaaaaaatata

SEQ ID NO: 12821 - RNA, 87 nt, synthetic construct
  source 1..87: mol_type = other RNA
aaaaaaaaaaaaaaataaataaataaataaatataaataaataaataaaaaaaaaaaaaaaaaaaaaaaaaaaaaaaataaatatat

SEQ ID NO: 12822 - RNA, 87 nt, synthetic construct
  source 1..87: mol_type = other RNA
aaaaaaaaaaataaataaataaataaataaatataaataaataaaaaaaaaaaaaaaaaaaaaaaaaaaaaaaaaaaataaatatat

SEQ ID NO: 12823 - RNA, 87 nt, synthetic construct
  source 1..87: mol_type = other RNA
aaataaaaaaaaaaaaaaaaaaaaaaaaaaaaaaaaaaaaaaataaataaaaaaaaaaaaaaaaaataaataaataaaaaaaatata

SEQ ID NO: 12824 - RNA, 87 nt, synthetic construct
  source 1..87: mol_type = other RNA
aaataaaaaaaaaaaaaaaaaaaaaaaaaaaaaaaaaaaaaaaaaaataaataaaaaaaaaaaaaataaataaataaaaaaaatata

SEQ ID NO: 12825 - RNA, 87 nt, synthetic construct
  source 1..87: mol_type = other RNA
aaataaaaaaaaaaaaaaaaaaaaaaaaaaaaaaaaaaaaaaataaataaataaaaaaaaaaaaaaaaaataaataaaaaaaatata

SEQ ID NO: 12826 - RNA, 87 nt, synthetic construct
  source 1..87: mol_type = other RNA
aaataaaaaaaaaaaaaaaaaaaaaaaaaaaaaaaaaaaaaaataaataaataaaaaataaataaaaaaaaaaaaaaaaaaaatata

SEQ ID NO: 12827 - RNA, 87 nt, synthetic construct
  source 1..87: mol_type = other RNA
aaataaaaaaaaaaaaaaaaaaaaaaaaaaaaaaaaaaaaaaataaataaataaaaaaaaaaaaaataaataaataaaaaaaatata

SEQ ID NO: 12828 - RNA, 87 nt, synthetic construct
  source 1..87: mol_type = other RNA
aaataaaaaaaaaaaaaaaaaaaaaaaaaaaaaaaaaaaaaaaaaaataaataaaaaaaaaataaataaataaataaaaaaaatata

SEQ ID NO: 12829 - RNA, 87 nt, synthetic construct
  source 1..87: mol_type = other RNA
aaataaaaaaaaaaaaaaaaaaaaaaaaaaaaaaaaaaaaaaataaataaaaaaaaaaaaaataaataaataaataaaaaaaatata

SEQ ID NO: 12830 - RNA, 87 nt, synthetic construct
  source 1..87: mol_type = other RNA
aaataaaaaaaaaaaaaaaaaaaaaaaaaaaaaaaaaaaaaaaaaaataaaaaaaaaataaataaataaataaataaaaaaaatata

SEQ ID NO: 12831 - RNA, 87 nt, synthetic construct
  source 1..87: mol_type = other RNA
aaataaaaaaaaaaaaaaaaaaaaaaaaaaaaaaaaaaaaaaataaataaataaaaaaaaaataaataaataaataaaaaaaatata

SEQ ID NO: 12832 - RNA, 87 nt, synthetic construct
  source 1..87: mol_type = other RNA
aaataaaaaaaaaaaaaaaaaaaaaaaaaaaaaaaaaaaaaaataaataaaaaaaaaataaataaataaataaataaaaaaaatata

SEQ ID NO: 12833 - RNA, 87 nt, synthetic construct
  source 1..87: mol_type = other RNA
aaataaaaaaaaaaaaaaaaaaaaaaaaaaaaaaaaaaaaaaaaaaataaaaaataaataaataaataaataaataaaaaaaatata

SEQ ID NO: 12834 - RNA, 87 nt, synthetic construct
  source 1..87: mol_type = other RNA
aaataaaaaaaaaaaaaaaaaaaaaaaaaaaaaaaaaaaaaaataaataaaaaataaataaataaataaataaataaaaaaaatata

SEQ ID NO: 12835 - RNA, 87 nt, synthetic construct
  source 1..87: mol_type = other RNA
aaataaaaaaaaaaaaaaaaaaaaaaaaaaaaaaaaaaaaaaataaataaataaaaaataaataaataaataaataaaaaaaatata

SEQ ID NO: 12836 - RNA, 87 nt, synthetic construct
  source 1..87: mol_type = other RNA
aaataaaaaaaaaaaaaaaaaaaaaaaaaaaaaaaaaaaaaaataaataaaaaaaaaataaataaataaataaataaataaaatata

SEQ ID NO: 12837 - RNA, 87 nt, synthetic construct
  source 1..87: mol_type = other RNA
aaatataaaaaaaaaaaaaaaaaaaaaaaaaaaaaaaaaaaaaaaaataaaaaaaaaaaaaaaaaaaaaaaaaaaaaaaaaaaaata

SEQ ID NO: 12838 - RNA, 87 nt, synthetic construct
  source 1..87: mol_type = other RNA
aaataaaaaaaaaaaaaaaaaaaaaaaaaaaaaaaaaaaaatataaataaaaaaaaaaaaaaaaaaaaaaaaaaaaaaaaaaaaata

SEQ ID NO: 12839 - RNA, 87 nt, synthetic construct
  source 1..87: mol_type = other RNA
aaatataaaaaaaaaaaaaaaaaaaaaaaaaaaaaaaaaaaaaaaaataaataaaaaaaaaaaaaaaaaaaaaaaaaaaaaaaaata

SEQ ID NO: 12840 - RNA, 87 nt, synthetic construct
  source 1..87: mol_type = other RNA
aaataaaaaaaaaaaaaaaaaaaaaaaaaaaaaaaaaaaaataaatataaaaaaaaaaaaaaaaaaaaaaaaaaaaaaaaaaaaata

SEQ ID NO: 12841 - RNA, 87 nt, synthetic construct
  source 1..87: mol_type = other RNA
aaatataaaaaaaaaaaaaaaaaaaaaaaaaaaaaaaaaaaaataaataaaaaaaaaaaaaaaaaaaaaaaaaaaaaaaaaaaaata

SEQ ID NO: 12842 - RNA, 87 nt, synthetic construct
  source 1..87: mol_type = other RNA
aaataaaaaaaaaaaaaaaaaaaaaaaaaaaaaaaaaaaaatataaataaataaaaaaaaaaaaaaaaaaaaaaaaaaaaaaaaata

SEQ ID NO: 12843 - RNA, 87 nt, synthetic construct
  source 1..87: mol_type = other RNA
aaataaaaaaaaaaaaaaaaaaaaaaaaaaaaaaaaataaatataaataaaaaaaaaaaaaaaaaaaaaaaaaaaaaaaaaaaaata

SEQ ID NO: 12844 - RNA, 87 nt, synthetic construct
  source 1..87: mol_type = other RNA
aaataaaaaaaaaaaaaaaaaaaaaaaaaaaaaaaaataaatataaataaataaaaaaaaaaaaaaaaaaaaaaaaaaaaaaaaata

SEQ ID NO: 12845 - RNA, 87 nt, synthetic construct
  source 1..87: mol_type = other RNA
aaatataaaaaaaaaaaaaaaaaaaaaaaaaaaaaaaaaaatataaataaaaaaaaaaaaaaaaaaaaaaaaaaaaaaaaaaataaa

SEQ ID NO: 12846 - RNA, 87 nt, synthetic construct
  source 1..87: mol_type = other RNA
aaataaaaaaaaaaaaaaaaaaaaaaaaaaaaaaaaaaaaaaaataataaaaaaaaaaaaaaaaaaaaaaaaaaaaaaaaaaatata

SEQ ID NO: 12847 - RNA, 87 nt, synthetic construct
  source 1..87: mol_type = other RNA
aaataaaaaaaaaaaaaaaaaaaaaaaaaaaaaaaaaaaaaaaaaaataataaaaaaaaaaaaaaaaaaaaaaaaaaaaaaaatata

SEQ ID NO: 12848 - RNA, 88 nt, synthetic construct
  source 1..88: mol_type = other RNA
aaaaaaaaaaaaaaaaaaaaaaaaaaaaaaaaaaaaaaaaaataaataaataaataaataaatataaataaaaaaaaaaaaaaataaa

SEQ ID NO: 12849 - RNA, 88 nt, synthetic construct
  source 1..88: mol_type = other RNA
aaaaaaaaaaaaaaaaaaaaataaaaaaaaaaaaaaataaataaaaaaaaaaaaaaaaaaaaaaaaaaaaaaaaaaaaaataaatata

SEQ ID NO: 12850 - RNA, 88 nt, synthetic construct
  source 1..88: mol_type = other RNA
aaataaataaataaataaataaataaataaatataaataaaaaataaataaaaaaaaaaaaaaaaaaaataaataaataaataaataa

SEQ ID NO: 12851 - RNA, 88 nt, synthetic construct
  source 1..88: mol_type = other RNA
aaaaaaaaaaaaaaaaaaaaatataaaaaaaaaaaaataaataaaaaaaaaaaaaaaaaaaaaaaaaaaaaaaaaaaaaataaatata

SEQ ID NO: 12852 - RNA, 88 nt, synthetic construct
  source 1..88: mol_type = other RNA
aaataaataaataaataaataaataaataaatataaataaaaaataaataaataaaaaaaaaaaaaaaataaataaataaataaataa

SEQ ID NO: 12853 - RNA, 88 nt, synthetic construct
  source 1..88: mol_type = other RNA
aaataaataaataaataaataaataaataaatataaataaaaaataaataaaaaaaaaaaaaaaataaataaataaataaataaataa

SEQ ID NO: 12854 - RNA, 88 nt, synthetic construct
  source 1..88: mol_type = other RNA
aaataaataaataaataaataaataaataaatataaataaaaaataaataaataaataaaaaaaaaaaataaataaataaataaataa

SEQ ID NO: 12855 - RNA, 88 nt, synthetic construct
  source 1..88: mol_type = other RNA
aaataaataaataaataaataaataaataaatataaataaaaaataaataaataaaaaaaaaaaataaataaataaataaataaataa

SEQ ID NO: 12856 - RNA, 88 nt, synthetic construct
  source 1..88: mol_type = other RNA
aaataaataaataaataaataaataaataaatataaataaaaaataaataaataaataaataaaaaaaataaataaataaataaataa

SEQ ID NO: 12857 - RNA, 88 nt, synthetic construct
  source 1..88: mol_type = other RNA
aaataaataaataaataaataaataaataaatataaataaaaaataaataaataaataaaaaaaataaataaataaataaataaataa

SEQ ID NO: 12858 - RNA, 88 nt, synthetic construct
  source 1..88: mol_type = other RNA
aaataaataaataaataaataaataaataaatataaataaaaaataaataaataaataaataaaataaataaataaataaataaataa

SEQ ID NO: 12859 - RNA, 88 nt, synthetic construct
  source 1..88: mol_type = other RNA
aaaaaaaataaataaataaataaataaataaataaatataaaaaaaaaaaaaaaaaaaaaaaaaaaaaaaaaaaaaataaaaaatata

SEQ ID NO: 12860 - RNA, 88 nt, synthetic construct
  source 1..88: mol_type = other RNA
aaataaaaaaaaaaaaaaaaataaaaaaaaaaaaaaataaataaaaaaaaaaaaaaaaaaaaaaaaaaaaaaaaaaaaaataaatata

SEQ ID NO: 12861 - RNA, 88 nt, synthetic construct
  source 1..88: mol_type = other RNA
aaataaataaataaataaataaataaataaatataaataaaaaataaataaaaaaaaaaaaaaaaaaaataaataaataaataaatat

SEQ ID NO: 12862 - RNA, 88 nt, synthetic construct
  source 1..88: mol_type = other RNA
aaaaaaaaaaataaataaaaaaaaaataaataaaaaaaaaaaaaaaaaaaaaaaaaaaaaaaaaaaaaaaaaaaaaaaaaaaaaataa

SEQ ID NO: 12863 - RNA, 88 nt, synthetic construct
  source 1..88: mol_type = other RNA
aaaaaaaaaaaaaaaaaaaaataaaaaaaaaaaaaaataaataaaaaaaaaaaaaaaaaaaaaaaaaaaaaaaaaaaaaataaataaa

SEQ ID NO: 12864 - RNA, 88 nt, synthetic construct
  source 1..88: mol_type = other RNA
aaataaataaataaataaataaataaataaatataaataataaataaataaaaaaaaaaaaaaaaaaaataaataaataaataaataa

SEQ ID NO: 12865 - RNA, 88 nt, synthetic construct
  source 1..88: mol_type = other RNA
aaataaataaataaataaataaataaataaatataaataataaataaataaataaaaaaaaaaaaaaaataaataaataaataaataa

SEQ ID NO: 12866 - RNA, 88 nt, synthetic construct
  source 1..88: mol_type = other RNA
aaataaataaataaataaataaataaataaatataaataataaataaataaaaaaaaaaaaaaaataaataaataaataaataaataa

SEQ ID NO: 12867 - RNA, 88 nt, synthetic construct
  source 1..88: mol_type = other RNA
aaataaataaataaataaataaataaataaatataaataataaataaataaataaaaaaaaaaaataaataaataaataaataaataa

SEQ ID NO: 12868 - RNA, 88 nt, synthetic construct
  source 1..88: mol_type = other RNA
aaataaataaataaataaataaataaataaatataaataataaataaataaataaataaaaaaaaaaaataaataaataaataaataa

SEQ ID NO: 12869 - RNA, 88 nt, synthetic construct
  source 1..88: mol_type = other RNA
aaataaataaataaataaataaataaataaatataaataataaataaataaataaataaataaaaaaaataaataaataaataaataa

SEQ ID NO: 12870 - RNA, 88 nt, synthetic construct
  source 1..88: mol_type = other RNA
aaataaataaataaataaataaataaataaatataaataataaataaataaataaataaataaaataaataaataaataaataaataa

SEQ ID NO: 12871 - RNA, 88 nt, synthetic construct
  source 1..88: mol_type = other RNA
aaaaaaaaaaaaaaaaaatataaataaataaataaataaatataaataaatataaaaaaaaaaaaaaaaaaaaaaaaaaaaaaaatat

SEQ ID NO: 12872 - RNA, 88 nt, synthetic construct
  source 1..88: mol_type = other RNA
aaaaaaaaaaaaaaaaaatataaataaataaataaataaatataaataaatataaataaaaaaaaaaaaaaaaaaaaaaaaaaaatat

SEQ ID NO: 12873 - RNA, 88 nt, synthetic construct
  source 1..88: mol_type = other RNA
aaaaaaaaaaaaaataaatataaataaataaataaataaatataaataaatataaaaaaaaaaaaaaaaaaaaaaaaaaaaaaaatat

SEQ ID NO: 12874 - RNA, 88 nt, synthetic construct
  source 1..88: mol_type = other RNA
aaaaaaaaaataaataaatataaataaataaataaataaatataaataaatataaaaaaaaaaaaaaaaaaaaaaaaaaaaaaaatat

SEQ ID NO: 12875 - RNA, 88 nt, synthetic construct
  source 1..88: mol_type = other RNA
aaaaaaaaaaaaaataaatataaataaataaataaataaatataaataaatataaataaaaaaaaaaaaaaaaaaaaaaaaaaaatat

SEQ ID NO: 12876 - RNA, 88 nt, synthetic construct
  source 1..88: mol_type = other RNA
aaataaataaataaataaataaataaataaatataaataaaaaataaatataaaaaaaaaaaaaaaaaataaataaataaataaataa

SEQ ID NO: 12877 - RNA, 88 nt, synthetic construct
  source 1..88: mol_type = other RNA
aaaaaaaaaataaataaatataaataaataaataaataaatataaataaatataaataaaaaaaaaaaaaaaaaaaaaaaaaaaatat

SEQ ID NO: 12878 - RNA, 88 nt, synthetic construct
  source 1..88: mol_type = other RNA
aaataaataaataaataaataaataaataaatataaataaaaaataaataaaaaaaaaaaaaatataaataaataaataaataaataa

SEQ ID NO: 12879 - RNA, 88 nt, synthetic construct
  source 1..88: mol_type = other RNA
aaataaataaataaataaataaataaataaatataaataaaaaataaataaatataaaaaaaaaaaaaataaataaataaataaataa

SEQ ID NO: 12880 - RNA, 88 nt, synthetic construct
  source 1..88: mol_type = other RNA
aaataaataaataaataaataaataaataaatataaataaaaaataaataaataaaaaaaaaatataaataaataaataaataaataa

SEQ ID NO: 12881 - RNA, 88 nt, synthetic construct
  source 1..88: mol_type = other RNA
aaataaataaataaataaataaataaataaatataaataaaaaataaataaatataaataaaaaaaaaataaataaataaataaataa

SEQ ID NO: 12882 - RNA, 88 nt, synthetic construct
  source 1..88: mol_type = other RNA
aaataaataaataaataaataaataaataaatataaataaaaaataaataaataaatataaaaaaaaaataaataaataaataaataa

SEQ ID NO: 12883 - RNA, 88 nt, synthetic construct
  source 1..88: mol_type = other RNA
aaataaataaataaataaataaataaataaatataaataaaaaataaataaatataaaaaaaaaataaataaataaataaataaataa

SEQ ID NO: 12884 - RNA, 88 nt, synthetic construct
  source 1..88: mol_type = other RNA
aaataaataaataaataaataaataaataaatataaataaaaaataaataaataaataaaaaatataaataaataaataaataaataa

SEQ ID NO: 12885 - RNA, 88 nt, synthetic construct
  source 1..88: mol_type = other RNA
aaaaaaaataaataaataaataaataaataaataaatataaaaaaaaaaaaaaaaaaaaaaaaaaaaaaaaaaaatataaaaaatata

SEQ ID NO: 12886 - RNA, 88 nt, synthetic construct
  source 1..88: mol_type = other RNA
aaaaaaaataaataaataaataaataaataaataaatataaataaaaaaaaaaaaaaaaaaaaaaaaaaaaaaaatataaaaaatata

SEQ ID NO: 12887 - RNA, 88 nt, synthetic construct
  source 1..88: mol_type = other RNA
aaaaaaaaaaatataaataaaaaaaataaataaaaaaaaaaaaaaaaaaaaaaaaaaaaaaaaaaaaaaaaaaaaaaaaaaaaaataa

SEQ ID NO: 12888 - RNA, 88 nt, synthetic construct
  source 1..88: mol_type = other RNA
aaaaaaaaaaataaatataaaaaaaataaataaaaaaaaaaaaaaaaaaaaaaaaaaaaaaaaaaaaaaaaaaaaaaaaaaaaaataa

SEQ ID NO: 12889 - RNA, 88 nt, synthetic construct
  source 1..88: mol_type = other RNA
aaaaaaaaaaatataaataaaaaaaataaataaataaaaaaaaaaaaaaaaaaaaaaaaaaaaaaaaaaaaaaaaaaaaaaaaaataa

SEQ ID NO: 12890 - RNA, 88 nt, synthetic construct
  source 1..88: mol_type = other RNA
aaaaaaaaaaatataaataaataaaataaataaaaaaaaaaaaaaaaaaaaaaaaaaaaaaaaaaaaaaaaaaaaaaaaaaaaaataa

SEQ ID NO: 12891 - RNA, 88 nt, synthetic construct
  source 1..88: mol_type = other RNA
aaaaaaaaaaataaatataaataaaataaataaaaaaaaaaaaaaaaaaaaaaaaaaaaaaaaaaaaaaaaaaaaaaaaaaaaaataa

SEQ ID NO: 12892 - RNA, 88 nt, synthetic construct
  source 1..88: mol_type = other RNA
aaaaaaaaaaataaatataaaaaaaataaataaataaaaaaaaaaaaaaaaaaaaaaaaaaaaaaaaaaaaaaaaaaaaaaaaaataa

SEQ ID NO: 12893 - RNA, 88 nt, synthetic construct
  source 1..88: mol_type = other RNA
aaaaaaaaaaataaatataaataaaataaataaataaaaaaaaaaaaaaaaaaaaaaaaaaaaaaaaaaaaaaaaaaaaaaaaaataa

SEQ ID NO: 12894 - RNA, 88 nt, synthetic construct
  source 1..88: mol_type = other RNA
aaaaaaaaaaatataaataaataaaataaataaataaaaaaaaaaaaaaaaaaaaaaaaaaaaaaaaaaaaaaaaaaaaaaaaaataa

SEQ ID NO: 12895 - RNA, 88 nt, synthetic construct
  source 1..88: mol_type = other RNA
aaaaaaaaataaataaataaataaataaataaaaaaaaaaaaaaaaaaaaaaaaatataaaaaaaaaaaaaaaaaaaaaaaaaaataa

SEQ ID NO: 12896 - RNA, 88 nt, synthetic construct
  source 1..88: mol_type = other RNA
aaaataaataaataaataaaaaaaaaaaaaaaaaaataaaaaaaaaaaaaaaaaaaaaaaaaaaaaaaaataaataaataaatataaa

SEQ ID NO: 12897 - RNA, 88 nt, synthetic construct
  source 1..88: mol_type = other RNA
aaaaaaataaataaataaataaataaataaatataaataaaaaataaataaaaaaaaaaaaaaaaaaaataaataaataaataaataa

SEQ ID NO: 12898 - RNA, 88 nt, synthetic construct
  source 1..88: mol_type = other RNA
aaaaaaataaataaataaataaataaataaatataaataaaaaataaataaataaaaaaaaaaaaaaaataaataaataaataaataa

SEQ ID NO: 12899 - RNA, 88 nt, synthetic construct
  source 1..88: mol_type = other RNA
aaaaaaataaataaataaataaataaataaatataaataaaaaataaataaaaaaaaaaaaaaaataaataaataaataaataaataa

SEQ ID NO: 12900 - RNA, 88 nt, synthetic construct
  source 1..88: mol_type = other RNA
aaaaaaataaataaataaataaataaataaatataaataaaaaataaataaataaataaaaaaaaaaaataaataaataaataaataa

SEQ ID NO: 12901 - RNA, 88 nt, synthetic construct
  source 1..88: mol_type = other RNA
aaaaaaataaataaataaataaataaataaatataaataaaaaataaataaataaaaaaaaaaaataaataaataaataaataaataa

SEQ ID NO: 12902 - RNA, 88 nt, synthetic construct
  source 1..88: mol_type = other RNA
aaataaataaataaataaataaataaataaatataaataataaataaataaaaaaaaaaaaaatataaataaataaataaataaataa

SEQ ID NO: 12903 - RNA, 88 nt, synthetic construct
  source 1..88: mol_type = other RNA
aaaaaaataaataaataaataaataaataaatataaataaaaaataaataaataaataaataaaaaaaataaataaataaataaataa

SEQ ID NO: 12904 - RNA, 88 nt, synthetic construct
  source 1..88: mol_type = other RNA
aaaaaaataaataaataaataaataaataaatataaataaaaaataaataaataaataaaaaaaataaataaataaataaataaataa

SEQ ID NO: 12905 - RNA, 88 nt, synthetic construct
  source 1..88: mol_type = other RNA
aaataaataaataaataaataaataaataaatataaataataaataaataaataaaaaaaaaatataaataaataaataaataaataa

SEQ ID NO: 12906 - RNA, 88 nt, synthetic construct
  source 1..88: mol_type = other RNA
aaaaaaataaataaataaataaataaataaatataaataaaaaataaataaataaataaataaaataaataaataaataaataaataa

SEQ ID NO: 12907 - RNA, 88 nt, synthetic construct
  source 1..88: mol_type = other RNA
aaataaataaataaataaataaataaataaatataaataaaaaataaataaataaataaataatataaataaataaataaataaataa

SEQ ID NO: 12908 - RNA, 88 nt, synthetic construct
  source 1..88: mol_type = other RNA
aaataaataaataaataaataaataaataaataaaaataaaaaataaataaaaaaaaaaaaaaaaaaaataaataaataaataaataa

SEQ ID NO: 12909 - RNA, 88 nt, synthetic construct
  source 1..88: mol_type = other RNA
aaaaaaaaaaaaataaaaaaaaaaaaaaaaaaaaaaaaaaataaataaaaaaaaaataaataaaaaaaaaaaaaaaaaaaaaaatata

SEQ ID NO: 12910 - RNA, 88 nt, synthetic construct
  source 1..88: mol_type = other RNA
aaaaaaaaaaaaaaaaaaaaataaaaaaaaaaaaaaataaataaaaaaaaaaaaaaaaaaaaaaaaaaataaaaaaaaaataaatata

SEQ ID NO: 12911 - RNA, 88 nt, synthetic construct
  source 1..88: mol_type = other RNA
aaaaaaaaaaaaaaaaaaaaataaaaaaaaaaaaaaataaataaaaaaaaaaaaaaaaaaaaaaaaaataaaaaaaaaaataaatata

SEQ ID NO: 12912 - RNA, 88 nt, synthetic construct
  source 1..88: mol_type = other RNA
aaaaaaaaaaaataaaaaaaataaaaaaaaaaaaaaataaataaaaaaaaaaaaaaaaaaaaaaaaaaaaaaaaaaaaaataaatata

SEQ ID NO: 12913 - RNA, 88 nt, synthetic construct
  source 1..88: mol_type = other RNA
aaaaaaaaaaaaataaaaaaaaaaaaaaaaaaaaaaaaaaataaataaaaaaaaaataaataaaaaaaaaaaaaaaaaaataaatata

SEQ ID NO: 12914 - RNA, 88 nt, synthetic construct
  source 1..88: mol_type = other RNA
aaaaaaaaaaaaataaaaaaaaaaaaaaaaaaaaaaaaaaataaataaataaaaaataaataaaaaaaaaaaaaaaaaaaaaaatata

SEQ ID NO: 12915 - RNA, 88 nt, synthetic construct
  source 1..88: mol_type = other RNA
aaaaaaaaaaaaaaaaaaaaataaaaaaaaaaaaaaataaataaaaaaaaaaaaaaaaaaaaaaataaataaaaaaaaaataaatata

SEQ ID NO: 12916 - RNA, 88 nt, synthetic construct
  source 1..88: mol_type = other RNA
aaaaaaaaaaaaaaaaaaaaataaaaaaaaaaaaaaataaataaataaaaaaaaaaaaaaaaaaaaaaataaaaaaaaaataaatata

SEQ ID NO: 12917 - RNA, 88 nt, synthetic construct
  source 1..88: mol_type = other RNA
aaaaaaaaaaaaaaaaataaataaaaaaaaaaaaaaataaataaaaaaaaaaaaaaaaaaaaaaaaaaataaaaaaaaaataaatata

SEQ ID NO: 12918 - RNA, 88 nt, synthetic construct
  source 1..88: mol_type = other RNA
aaaaaaaaaaaaaaaaaaaaataaataaaaaaaaaaataaataaaaaaaaaaaaaaaaaaaaaaaaaaataaaaaaaaaataaatata

SEQ ID NO: 12919 - RNA, 88 nt, synthetic construct
  source 1..88: mol_type = other RNA
aaaaaaaaaaaaaaaaaaaaataaaaaaaaaaataaataaataaaaaaaaaaaaaaaaaaaaaaaaaaataaaaaaaaaataaatata

SEQ ID NO: 12920 - RNA, 88 nt, synthetic construct
  source 1..88: mol_type = other RNA
aaaaaaaaaaaaaaaaaaaaataaaaaaaaaaaaaaataaataaataaaaaaaaaaaaaaaaaaataaataaaaaaaaaataaatata

SEQ ID NO: 12921 - RNA, 88 nt, synthetic construct
  source 1..88: mol_type = other RNA
aaaaaaaaaaaaaaaaaaaaataaaaaaaaaaaaaaataaataaataaataaaaaaaaaaaaaaaaaaataaaaaaaaaataaatata

SEQ ID NO: 12922 - RNA, 88 nt, synthetic construct
  source 1..88: mol_type = other RNA
aaaaaaaaaaaaaaaaataaataaaaaaaaaaaaaaataaataaaaaaaaaaaaaaaaaaaaaaataaataaaaaaaaaataaatata

SEQ ID NO: 12923 - RNA, 88 nt, synthetic construct
  source 1..88: mol_type = other RNA
aaaaaaaaaaaaaaaaaaaaataaataaaaaaaaaaataaataaaaaaaaaaaaaaaaaaaaaaataaataaaaaaaaaataaatata

SEQ ID NO: 12924 - RNA, 88 nt, synthetic construct
  source 1..88: mol_type = other RNA
aaaaaaaaaaaaaaaaataaataaaaaaaaaaaaaaataaataaataaaaaaaaaaaaaaaaaaaaaaataaaaaaaaaataaatata

SEQ ID NO: 12925 - RNA, 88 nt, synthetic construct
  source 1..88: mol_type = other RNA
aataaataaatataaaaaaaaaaaaaaaaaaaaaaaataaaaaaaaaaaaaaaaaaaaaaaaaaaaaaaaaaaatataaataaatata

SEQ ID NO: 12926 - RNA, 88 nt, synthetic construct
  source 1..88: mol_type = other RNA
aaaaaaaaaaaaaaaaataaataaaaaaaaaaaaaaataaataaataaaaaaaaaaaaaaaaaaataaataaaaaaaaaataaatata

SEQ ID NO: 12927 - RNA, 88 nt, synthetic construct
  source 1..88: mol_type = other RNA
aaaaaaaaaaaaaaaaaaaaataaaaaaaaaaaaaaataaataaataaataaaaaaaaaaaaaaataaataaaaaaaaaataaatata

SEQ ID NO: 12928 - RNA, 88 nt, synthetic construct
  source 1..88: mol_type = other RNA
aaaaaaaaaaaaaaaaaaaaataaataaaaaaaaaaataaataaataaaaaaaaaaaaaaaaaaataaataaaaaaaaaataaatata

SEQ ID NO: 12929 - RNA, 88 nt, synthetic construct
  source 1..88: mol_type = other RNA
aaaaaaaaaaaaaaaaataaataaaaaaaaaaaaaaataaataaataaataaaaaaaaaaaaaaaaaaataaaaaaaaaataaatata

SEQ ID NO: 12930 - RNA, 88 nt, synthetic construct
  source 1..88: mol_type = other RNA
aaaaaaaaaaaaaaaaataaataaataaaaaaaaaaataaataaaaaaaaaaaaaaaaaaaaaaataaataaaaaaaaaataaatata

SEQ ID NO: 12931 - RNA, 88 nt, synthetic construct
  source 1..88: mol_type = other RNA
aaaaaaaaaaaaaataaataaaaaaaaaaaataaataaataaataaataaaaaaaaaaaaaaaaaaaataaataaataaataaataat

SEQ ID NO: 12932 - RNA, 88 nt, synthetic construct
  source 1..88: mol_type = other RNA
aaaaaaaaaaaaaaaaataaataaataaaaaaaaaaataaataaataaaaaaaaaaaaaaaaaaataaataaaaaaaaaataaatata

SEQ ID NO: 12933 - RNA, 88 nt, synthetic construct
  source 1..88: mol_type = other RNA
aaaaaaaaaaaaaaaaataaataaaaaaaaaaaaaaataaataaataaataaaaaaaaaaaaaaataaataaaaaaaaaataaatata

SEQ ID NO: 12934 - RNA, 88 nt, synthetic construct
  source 1..88: mol_type = other RNA
aaaaaaaaaaaaaaaaaaaaataaataaaaaaaaaaataaataaataaataaaaaaaaaaaaaaataaataaaaaaaaaataaatata

SEQ ID NO: 12935 - RNA, 88 nt, synthetic construct
  source 1..88: mol_type = other RNA
aaataaataaatataaatataaataaataaatataaataaaaaataaataaaaaaaaaaaaaaaaaaaataaataaataaataaataa

SEQ ID NO: 12936 - RNA, 88 nt, synthetic construct
  source 1..88: mol_type = other RNA
aaataaatataaatataaataaataaataaatataaataaaaaataaataaaaaaaaaaaaaaaaaaaataaataaataaataaataa

SEQ ID NO: 12937 - RNA, 88 nt, synthetic construct
  source 1..88: mol_type = other RNA
aaaaaaaaaaaaaataaataaaaaaaataaataaataaataaataaataaaaaaaaaaaaaaaaaaaataaataaataaataaataat

SEQ ID NO: 12938 - RNA, 88 nt, synthetic construct
  source 1..88: mol_type = other RNA
aaaaaaaaaaaataaataaaaaaaaaataaataaataaataaataaataaataaaaaaaaaaaaaaaaaaaaaaataaaaaaaatata

SEQ ID NO: 12939 - RNA, 88 nt, synthetic construct
  source 1..88: mol_type = other RNA
aaaaaaaaaaaaaaaaataaataaataaaaaaaaaaataaataaataaataaaaaaaaaaaaaaataaataaaaaaaaaataaatata

SEQ ID NO: 12940 - RNA, 88 nt, synthetic construct
  source 1..88: mol_type = other RNA
aaataaataaatataaatataaataaataaatataaataaaaaataaataaataaaaaaaaaaaaaaaataaataaataaataaataa

SEQ ID NO: 12941 - RNA, 88 nt, synthetic construct
  source 1..88: mol_type = other RNA
aaataaataaatataaatataaataaataaatataaataaaaaataaataaaaaaaaaaaaaaaataaataaataaataaataaataa

SEQ ID NO: 12942 - RNA, 88 nt, synthetic construct
  source 1..88: mol_type = other RNA
aaataaatataaatataaataaataaataaatataaataaaaaataaataaataaaaaaaaaaaaaaaataaataaataaataaataa

SEQ ID NO: 12943 - RNA, 88 nt, synthetic construct
  source 1..88: mol_type = other RNA
aaaaaaaaaaaataaataaataaaaaataaataaataaataaataaataaataaaaaaaaaaaaaaaaaaaaaaataaaaaaaatata

SEQ ID NO: 12944 - RNA, 88 nt, synthetic construct
  source 1..88: mol_type = other RNA
aaaaaaaaaaaataaataaaaaaaaaataaataaataaataaataaataaataaaaaaaaaaaaaaaaaaaaaaataaataaaatata

SEQ ID NO: 12945 - RNA, 88 nt, synthetic construct
  source 1..88: mol_type = other RNA
aaaaaaaaaaaataaataaaaaaaaaataaataaataaataaataaataaataaaaaaaaaaaaaaaaaaataaataaaaaaaatata

SEQ ID NO: 12946 - RNA, 88 nt, synthetic construct
  source 1..88: mol_type = other RNA
aaaaaaaaaaaataaataaaaaaaaaataaataaataaataaataaataaataaataaaaaaaaaaaaaaaaaaataaaaaaaatata

SEQ ID NO: 12947 - RNA, 88 nt, synthetic construct
  source 1..88: mol_type = other RNA
aaaaaaaaaaaataaataaaaaataaataaataaataaataaataaataaataaaaaaaaaaaaaaaaaaaaaaataaaaaaaatata

SEQ ID NO: 12948 - RNA, 89 nt, synthetic construct
  source 1..89: mol_type = other RNA
aaaaaaaaaaaataaatataaataaaaaaaaaaaaaaaaaaaaaaataaataaataaaaaaaaaaaaaaaaaaaaaaaaaaaaaatata

SEQ ID NO: 12949 - RNA, 89 nt, synthetic construct
  source 1..89: mol_type = other RNA
aaaaaaaaaaaataaatataaataaaaaaaaaaaaaaaaaaaaaaataaataaataaataaaaaaaaaaaaaaaaaaaaaaaaaatata

SEQ ID NO: 12950 - RNA, 89 nt, synthetic construct
  source 1..89: mol_type = other RNA
aaaaaaaaaataaaaaaaaaaaaaaaataaataaataaatataaaaaaaaaaaaaaaaaaaaaaaaaaaaaaaaaaataaataaatata

SEQ ID NO: 12951 - RNA, 89 nt, synthetic construct
  source 1..89: mol_type = other RNA
aaaaaaaaaataaaaaaaaaaaaaaaataaataaatataaataaaaaaaaaaaaaaaaaaaaaaaaaaaaaaaaaaataaataaatata

SEQ ID NO: 12952 - RNA, 89 nt, synthetic construct
  source 1..89: mol_type = other RNA
aaaaaaaaaataaaaaaaaaaaaaaaataaataaataaatataaaaaaaaaaaaaaaaaaaaaaaaaaaaaaataaataaataaatata

SEQ ID NO: 12953 - RNA, 89 nt, synthetic construct
  source 1..89: mol_type = other RNA
aaaaaaaaaataaaaaaaaaaaaaaaataaataaatataaataaaaaaaaaaaaaaaaaaaaaaaaaaaaaaataaataaataaatata

SEQ ID NO: 12954 - RNA, 89 nt, synthetic construct
  source 1..89: mol_type = other RNA
aaaaaaaaaataaaaaaaaaaaataaataaataaataaatataaaaaaaaaaaaaaaaaaaaaaaaaaaaaaaaaaataaataaatata

SEQ ID NO: 12955 - RNA, 89 nt, synthetic construct
  source 1..89: mol_type = other RNA
aaaaaaaaaataaaaaaaaaaaataaataaataaatataaataaaaaaaaaaaaaaaaaaaaaaaaaaaaaaaaaaataaataaatata

SEQ ID NO: 12956 - RNA, 89 nt, synthetic construct
  source 1..89: mol_type = other RNA
aaaaaaaaaataaataaaaaaaaaaaataaataaataaatataaaaaaaaaaaaaaaaaaaaaaaaaaaaaaaaaaataaataaatata

SEQ ID NO: 12957 - RNA, 89 nt, synthetic construct
  source 1..89: mol_type = other RNA
aaaaaaaaaataaataaaaaaaaaaaataaataaataaatataaaaaaaaaaaaaaaaaaaaaaaaaaaaaaataaataaataaatata

SEQ ID NO: 12958 - RNA, 89 nt, synthetic construct
  source 1..89: mol_type = other RNA
aaaaaaaaaataaaaaaaaaaaataaataaataaataaatataaaaaaaaaaaaaaaaaaaaaaaaaaaaaaataaataaataaatata

SEQ ID NO: 12959 - RNA, 89 nt, synthetic construct
  source 1..89: mol_type = other RNA
aaaaaaaaaataaaaaaaaaaaataaataaataaatataaataaaaaaaaaaaaaaaaaaaaaaaaaaaaaaataaataaataaatata

SEQ ID NO: 12960 - RNA, 89 nt, synthetic construct
  source 1..89: mol_type = other RNA
aaaaaaaaaataaataaaaaaaataaataaataaataaatataaaaaaaaaaaaaaaaaaaaaaaaaaaaaaaaaaataaataaatata

SEQ ID NO: 12961 - RNA, 89 nt, synthetic construct
  source 1..89: mol_type = other RNA
aaaaaaaaaataaataaaaaaaaaaaataaataaatataaataaaaaaaaaaaaaaaaaaaaaaaaaaaaaaataaataaataaatata

SEQ ID NO: 12962 - RNA, 89 nt, synthetic construct
  source 1..89: mol_type = other RNA
aaaaaaaaaaaaaaaaaaaaataaataaatataaataaaaaaaaaataaataaataaataaataaaaaaaaaaaaaaaaaaaaaatata

SEQ ID NO: 12963 - RNA, 89 nt, synthetic construct
  source 1..89: mol_type = other RNA
aaaaaaaaaataaataaaaaaaataaataaataaataaatataaaaaaaaaaaaaaaaaaaaaaaaaaaaaaataaataaataaatata

SEQ ID NO: 12964 - RNA, 89 nt, synthetic construct
  source 1..89: mol_type = other RNA
aaaaaaaaaataaaaaaaataaataaataaataaataaatataaaaaaaaaaaaaaaaaaaaaaaaaaaaaaataaataaataaatata

SEQ ID NO: 12965 - RNA, 89 nt, synthetic construct
  source 1..89: mol_type = other RNA
aaaaaaaaaataaataaaaaaaataaataaataaatataaataaaaaaaaaaaaaaaaaaaaaaaaaaaaaaataaataaataaatata

SEQ ID NO: 12966 - RNA, 89 nt, synthetic construct
  source 1..89: mol_type = other RNA
aaaaaaaaaataaaaaaaataaataaataaataaatataaataaaaaaaaaaaaaaaaaaaaaaaaaaaaaaataaataaataaatata

SEQ ID NO: 12967 - RNA, 89 nt, synthetic construct
  source 1..89: mol_type = other RNA
aaaaaaaaaaaaaaaaataaataaataaatataaataaaaaaaaaataaataaataaataaataaaaaaaaaaaaaaaaaaaaaatata

SEQ ID NO: 12968 - RNA, 89 nt, synthetic construct
  source 1..89: mol_type = other RNA
aaaaaaaaaaaaaaaaaaaaataaataaatataaataaataaaaaataaataaataaataaataaaaaaaaaaaaaaaaaaaaaatata

SEQ ID NO: 12969 - RNA, 89 nt, synthetic construct
  source 1..89: mol_type = other RNA
aaataaataaataaaaaaaaaaaaaaaaaataaataaaaaaaaaaaaaaaaaaaaaaaaaaaaaaaaaaaaaaaataaaaaaaaatata

SEQ ID NO: 12970 - RNA, 89 nt, synthetic construct
  source 1..89: mol_type = other RNA
aaatataaataaatataaaaaaaaaaaaaaataaaaaaaaaaaaaataaataaataaataaataaataaataaataaataaataaataa

SEQ ID NO: 12971 - RNA, 89 nt, synthetic construct
  source 1..89: mol_type = other RNA
aaatataaataaatataaaaaaaaaaataaataaaaaaaaaaaaaataaataaataaataaataaataaataaataaataaataaataa

SEQ ID NO: 12972 - RNA, 89 nt, synthetic construct
  source 1..89: mol_type = other RNA
aaatataaataaatataaaaaaataaataaataaaaaaaaaaaaaataaataaataaataaataaataaataaataaataaataaataa

SEQ ID NO: 12973 - RNA, 89 nt, synthetic construct
  source 1..89: mol_type = other RNA
aaaaaaaatataaaaaaaaaaaaaaaataaataaataaatataaaaaaaaaaaaaaaaaaaaaaaaaaaaaaaaaaataaataaatata

SEQ ID NO: 12974 - RNA, 89 nt, synthetic construct
  source 1..89: mol_type = other RNA
aaaaaaaaaataaaaaaaaaaaaaatataaataaataaatataaaaaaaaaaaaaaaaaaaaaaaaaaaaaaaaaaataaataaatata

SEQ ID NO: 12975 - RNA, 89 nt, synthetic construct
  source 1..89: mol_type = other RNA
aaaaaaaaaatataaaaaaaaaaaaaataaataaataaatataaaaaaaaaaaaaaaaaaaaaaaaaaaaaaaaaaataaataaatata

SEQ ID NO: 12976 - RNA, 89 nt, synthetic construct
  source 1..89: mol_type = other RNA
aaaaaaaatataaaaaaaaaaaaaaaataaataaataaatataaaaaaaaaaaaaaaaaaaaaaaaaaaaaaataaataaataaatata

SEQ ID NO: 12977 - RNA, 89 nt, synthetic construct
  source 1..89: mol_type = other RNA
aaaaaaaaaatataaaaaaaaaaaaaataaataaataaatataaaaaaaaaaaaaaaaaaaaaaaaaaaaaaataaataaataaatata

SEQ ID NO: 12978 - RNA, 89 nt, synthetic construct
  source 1..89: mol_type = other RNA
aaaaaaaatataaaaaaaaaaaaaaaataaataaatataaataaaaaaaaaaaaaaaaaaaaaaaaaaaaaaataaataaataaatata

SEQ ID NO: 12979 - RNA, 89 nt, synthetic construct
  source 1..89: mol_type = other RNA
aaaaaaaatataaataaaaaaaaaaaataaataaataaatataaaaaaaaaaaaaaaaaaaaaaaaaaaaaaaaaaataaataaatata

SEQ ID NO: 12980 - RNA, 89 nt, synthetic construct
  source 1..89: mol_type = other RNA
aaaaaaaatataaataaaaaaaaaaaataaataaataaatataaaaaaaaaaaaaaaaaaaaaaaaaaaaaaataaataaataaatata

SEQ ID NO: 12981 - RNA, 89 nt, synthetic construct
  source 1..89: mol_type = other RNA
aaaaaaaatataaataaaaaaaaaaaataaataaatataaataaaaaaaaaaaaaaaaaaaaaaaaaaaaaaataaataaataaatata

SEQ ID NO: 12982 - RNA, 89 nt, synthetic construct
  source 1..89: mol_type = other RNA
aaaaaaaaaatataaaaaaaaaataaataaataaataaatataaaaaaaaaaaaaaaaaaaaaaaaaaaaaaataaataaataaatata

SEQ ID NO: 12983 - RNA, 89 nt, synthetic construct
  source 1..89: mol_type = other RNA
aaaaaaaatataaaaaaaaaaaataaataaataaataaatataaaaaaaaaaaaaaaaaaaaaaaaaaaaaaataaataaataaatata

SEQ ID NO: 12984 - RNA, 89 nt, synthetic construct
  source 1..89: mol_type = other RNA
aaaaaaaatataaaaaaaaaaaataaataaataaatataaataaaaaaaaaaaaaaaaaaaaaaaaaaaaaaataaataaataaatata

SEQ ID NO: 12985 - RNA, 89 nt, synthetic construct
  source 1..89: mol_type = other RNA
aaaaaaaaaaaaaaaaaaaaataaataaatataaataaaaaaaatataaataaataaataaataaaaaaaaaaaaaaaaaaaaaatata

SEQ ID NO: 12986 - RNA, 89 nt, synthetic construct
  source 1..89: mol_type = other RNA
aaaaaaaaaatataaaaaataaataaataaataaataaatataaaaaaaaaaaaaaaaaaaaaaaaaaaaaaataaataaataaatata

SEQ ID NO: 12987 - RNA, 89 nt, synthetic construct
  source 1..89: mol_type = other RNA
aaaaaaaatataaataaaaaaaataaataaataaataaatataaaaaaaaaaaaaaaaaaaaaaaaaaaaaaataaataaataaatata

SEQ ID NO: 12988 - RNA, 89 nt, synthetic construct
  source 1..89: mol_type = other RNA
aaaaaaaatataaataaaaaaaataaataaataaatataaataaaaaaaaaaaaaaaaaaaaaaaaaaaaaaataaataaataaatata

SEQ ID NO: 12989 - RNA, 89 nt, synthetic construct
  source 1..89: mol_type = other RNA
aaaaaaaaaatataaaaaataaataaataaataaatataaataaaaaaaaaaaaaaaaaaaaaaaaaaaaaaataaataaataaatata

SEQ ID NO: 12990 - RNA, 89 nt, synthetic construct
  source 1..89: mol_type = other RNA
aaaaaaaatataaataaaataaataaataaataaatataaataaaaaaaaaaaaaaaaaaaaaaaaaaaaaaataaataaataaatata

SEQ ID NO: 12991 - RNA, 89 nt, synthetic construct
  source 1..89: mol_type = other RNA
aaaaaaaatataaataaaataaataaataaataaataaatataaaaaaaaaaaaaaaaaaaaaaaaaaaaaaataaataaataaatata

SEQ ID NO: 12992 - RNA, 89 nt, synthetic construct
  source 1..89: mol_type = other RNA
aaaaaaaaaataaaaaaaaaaaaaaaataaataaataaatatataaaaaaaaaaaaaaaaaaaaaaaaaaaaataaataaataaatata

SEQ ID NO: 12993 - RNA, 89 nt, synthetic construct
  source 1..89: mol_type = other RNA
aaaaaaaaaataaaaaaaaaaaataaataaataaataaatatataaaaaaaaaaaaaaaaaaaaaaaaaaaaataaataaataaatata

SEQ ID NO: 12994 - RNA, 89 nt, synthetic construct
  source 1..89: mol_type = other RNA
aaaaaaaaaaaaaaaaataaataaataaatataaataaaaaaaaaataaataaataaataaataaaaaaaaaaaaaaaaaaaatatata

SEQ ID NO: 12995 - RNA, 89 nt, synthetic construct
  source 1..89: mol_type = other RNA
aaataaataaataaaaaaaaaaaaaaaaaataaataaaaaaaaaaaaaaaaaaaaaaaaaaaaaaaaaaaaaaaataaaaaaatatata

SEQ ID NO: 12996 - RNA, 89 nt, synthetic construct
  source 1..89: mol_type = other RNA
aaaaaaaaaaaaaaaaaaaaataaataaatataaataaaaaaaaaataaataaataaataaataaaaaaaaaaaaaaaaaaaaaataaa

SEQ ID NO: 12997 - RNA, 89 nt, synthetic construct
  source 1..89: mol_type = other RNA
aaaaaaaaataaaaaaaaaaaaaaaaaaaaaaataaataaaaaaaaaaaaaataaaaaaaaaaaaaaaaaaaaaaaataaataaatata

SEQ ID NO: 12998 - RNA, 89 nt, synthetic construct
  source 1..89: mol_type = other RNA
aaaaaaaaaataaaaaaaaaaaaaaaataaataaataaaaataaaaaaaaaaaaaaaaaaaaaaaaaaaaaaaaaaataaataaatata

SEQ ID NO: 12999 - RNA, 89 nt, synthetic construct
  source 1..89: mol_type = other RNA
aaaaaaaaataaataaaaaaaaaaaaaaaaaaataaataaaaaaaaaaaaaataaaaaaaaaaaaaaaaaaaaaaaataaataaatata

SEQ ID NO: 13000 - RNA, 89 nt, synthetic construct
  source 1..89: mol_type = other RNA
aaaaaaaaaataaaaaaaaaaaaaaaataaataaataaaaataaaaaaaaaaaaaaaaaaaaaaaaaaaaaaataaataaataaatata

SEQ ID NO: 13001 - RNA, 89 nt, synthetic construct
  source 1..89: mol_type = other RNA
aaaaaaaaataaataaaaaaaaaaaaaaataaataaataaaaaaaaaaaaaataaaaaaaaaaaaaaaaaaaaaaaataaataaatata

SEQ ID NO: 13002 - RNA, 89 nt, synthetic construct
  source 1..89: mol_type = other RNA
aaaaaaaaataaataaaaaaaaaaaaaaaaaaataaataaaaaaaaaaaaaataaataaaaaaaaaaaaaaaaaaaataaataaatata

SEQ ID NO: 13003 - RNA, 89 nt, synthetic construct
  source 1..89: mol_type = other RNA
aaaaaaaaataaataaataaaaaaaaaaaaaaataaataaaaaaaaaaaaaataaaaaaaaaaaaaaaaaaaaaaaataaataaatata

SEQ ID NO: 13004 - RNA, 89 nt, synthetic construct
  source 1..89: mol_type = other RNA
aaaaaaaaaataaataaaaaaaaaaaataaataaataaaaataaaaaaaaaaaaaaaaaaaaaaaaaaaaaaataaataaataaatata

SEQ ID NO: 13005 - RNA, 89 nt, synthetic construct
  source 1..89: mol_type = other RNA
aaaaaaaaataaataaaaaaaaaaaaaaataaataaataaaaaaaaaaaaaataaataaaaaaaaaaaaaaaaaaaataaataaatata

SEQ ID NO: 13006 - RNA, 89 nt, synthetic construct
  source 1..89: mol_type = other RNA
aaatataaataaatataaaaaaaaaaataaataaaaaaaaaaaatataaataaataaataaataaataaataaataaataaataaataa

SEQ ID NO: 13007 - RNA, 89 nt, synthetic construct
  source 1..89: mol_type = other RNA
aaatataaataaatataaaaaaaaatataaataaaaaaaaaaaaaataaataaataaataaataaataaataaataaataaataaataa

SEQ ID NO: 13008 - RNA, 89 nt, synthetic construct
  source 1..89: mol_type = other RNA
aaatataaataaatataaaaaaaaaaataaataaaaaaaataaatataaataaataaataaataaataaataaataaataaataaataa

SEQ ID NO: 13009 - RNA, 89 nt, synthetic construct
  source 1..89: mol_type = other RNA
aaatataaataaatataaaaaaaaaaataaataaataaaaaaaatataaataaataaataaataaataaataaataaataaataaataa

SEQ ID NO: 13010 - RNA, 89 nt, synthetic construct
  source 1..89: mol_type = other RNA
aaatataaataaatataaaaaaaaaaataaataaataaataaaatataaataaataaataaataaataaataaataaataaataaataa

SEQ ID NO: 13011 - RNA, 89 nt, synthetic construct
  source 1..89: mol_type = other RNA
aaatataaataaatataaaaaaaaaaataaataaataaaataaatataaataaataaataaataaataaataaataaataaataaataa

SEQ ID NO: 13012 - RNA, 89 nt, synthetic construct
  source 1..89: mol_type = other RNA
aaatataaataaatataaataaaaaaataaataaataaaaaaaatataaataaataaataaataaataaataaataaataaataaataa

SEQ ID NO: 13013 - RNA, 89 nt, synthetic construct
  source 1..89: mol_type = other RNA
aaatataaataaatataaataaaaaaataaataaaaaaaataaatataaataaataaataaataaataaataaataaataaataaataa

SEQ ID NO: 13014 - RNA, 89 nt, synthetic construct
  source 1..89: mol_type = other RNA
aaatataaataaatataaataaaaaaataaataaataaataaaatataaataaataaataaataaataaataaataaataaataaataa

SEQ ID NO: 13015 - RNA, 89 nt, synthetic construct
  source 1..89: mol_type = other RNA
aaatataaataaatataaataaaaaaataaataaataaaataaatataaataaataaataaataaataaataaataaataaataaataa

SEQ ID NO: 13016 - RNA, 89 nt, synthetic construct
  source 1..89: mol_type = other RNA
aaatataaataaatataaaaaaaaaaataaataaaaaaaataaatataaataaataaataaataaataaataaataaataaataaatat

SEQ ID NO: 13017 - RNA, 89 nt, synthetic construct
  source 1..89: mol_type = other RNA
aaaaaaaataaaaaaaaaaaaaaaaaaaaaaaaaaaaaaaaaaaaaaaaaaaaaaaaaaaataaaaaaaaaaaatataaatataaataa

SEQ ID NO: 13018 - RNA, 89 nt, synthetic construct
  source 1..89: mol_type = other RNA
aaatataaataaatataaaaaaaaaaataaataaataaataaaatataaataaataaataaataaataaataaataaataaataaatat

SEQ ID NO: 13019 - RNA, 89 nt, synthetic construct
  source 1..89: mol_type = other RNA
aaatataaataaatataaaaaaaaaaataaataaataaaataaatataaataaataaataaataaataaataaataaataaataaatat

SEQ ID NO: 13020 - RNA, 89 nt, synthetic construct
  source 1..89: mol_type = other RNA
aaatataaataaatataaataaaaaaataaataaaaaaaataaatataaataaataaataaataaataaataaataaataaataaatat

SEQ ID NO: 13021 - RNA, 89 nt, synthetic construct
  source 1..89: mol_type = other RNA
aaaaaaaaaaaataaatataaataaaaaaaaaaaaaaaaaaaaaaataaatatataaataaaaaaaaaaaaaaaaaaaaaaaaaatata

SEQ ID NO: 13022 - RNA, 89 nt, synthetic construct
  source 1..89: mol_type = other RNA
aaaaaaaaaataaataaaaaaaaaaaaaaaaaaaaaaaaaaaaataaataaatataaaaaaaaaaaaaaaaaaaaaatataaatatata

SEQ ID NO: 13023 - RNA, 89 nt, synthetic construct
  source 1..89: mol_type = other RNA
aaaaaaaaaataaaaaaaaaaaaaaaataaatatataaatataaaaaaaaaaaaaaaaaaaaaaaaaaaaaaaaaaataaataaatata

SEQ ID NO: 13024 - RNA, 89 nt, synthetic construct
  source 1..89: mol_type = other RNA
aaaaaaaataaataaaaaaaaaaaaaaaaaaaaaaaaaaaaaaaaaaaaaaaaaaaaaaaataaaaaaaaaaaatataaatataaataa

SEQ ID NO: 13025 - RNA, 89 nt, synthetic construct
  source 1..89: mol_type = other RNA
aaatataaataaatataaataaaaaaataaataaataaataaaatataaataaataaataaataaataaataaataaataaataaatat

SEQ ID NO: 13026 - RNA, 89 nt, synthetic construct
  source 1..89: mol_type = other RNA
aaatataaataaatataaataaaaaaataaataaataaaataaatataaataaataaataaataaataaataaataaataaataaatat

SEQ ID NO: 13027 - RNA, 89 nt, synthetic construct
  source 1..89: mol_type = other RNA
aaaaaataaataaataaaaaaaaaaaaaaaaaaaaaaaaaaaaataaataaatataaaaaaaaaaaaaaaaaaaaaatataaatatata

SEQ ID NO: 13028 - RNA, 89 nt, synthetic construct
  source 1..89: mol_type = other RNA
aaaaaaaaaataaataaaaaaaaaaaaaaaaaaaaaaaaaaaaataaataaatataaaaaaaaaaaaaaaaaataaatataaatatata

SEQ ID NO: 13029 - RNA, 89 nt, synthetic construct
  source 1..89: mol_type = other RNA
aaaaaaaataaataaaaaaaaaaaaaaaaaaaaaaaaaaaaaaaaaaaaaaaaaaaaaaaataaataaaaaaaatataaatataaataa

SEQ ID NO: 13030 - RNA, 89 nt, synthetic construct
  source 1..89: mol_type = other RNA
aaaaaataaataaataaaaaaaaaaaaaaaaaaaaaaaaaaaaataaataaatataaaaaaaaaaaaaaaaaataaatataaatatata

SEQ ID NO: 13031 - RNA, 89 nt, synthetic construct
  source 1..89: mol_type = other RNA
aaaaaaaatatataaaaaaaaaaaaaataaataaataaatataaaaaaaaaaaaaaaaaaaaaaaaaaaaaaataaataaataaatata

SEQ ID NO: 13032 - RNA, 89 nt, synthetic construct
  source 1..89: mol_type = other RNA
aaaaaaaaaatatataaaaaaaaaaaataaataaataaatataaaaaaaaaaaaaaaaaaaaaaaaaaaaaaataaataaataaatata

SEQ ID NO: 13033 - RNA, 89 nt, synthetic construct
  source 1..89: mol_type = other RNA
aaaaaaaatataaaaaaaaaaaaaaaataaataaataaatatataaaaaaaaaaaaaaaaaaaaaaaaaaaaataaataaataaatata

SEQ ID NO: 13034 - RNA, 89 nt, synthetic construct
  source 1..89: mol_type = other RNA
aaaaaaaaaaaaaaaaaaaaataaataaatataaataaaaaaaaaatatataaataaataaataaaaaaaaaaaaaaaaaaaaaatata

SEQ ID NO: 13035 - RNA, 89 nt, synthetic construct
  source 1..89: mol_type = other RNA
aaaaaaaatataaaaaaaaaaaaaaaataaataaataaatatataaataaaaaaaaaaaaaaaaaaaaaaaaataaataaataaatata

SEQ ID NO: 13036 - RNA, 89 nt, synthetic construct
  source 1..89: mol_type = other RNA
aaaaaaaaaaaaaaaaaaaaataaataaatataaataaataaaaaataaataaatatataaataaaaaaaaaaaaaaaaaaaaaatata

SEQ ID NO: 13037 - RNA, 89 nt, synthetic construct
  source 1..89: mol_type = other RNA
aaaaaaaaaaaaaaaaataaataaataaatataaataaaaaaaaaataaataaatatataaataaaaaaaaaaaaaaaaaaaaaatata

SEQ ID NO: 13038 - RNA, 89 nt, synthetic construct
  source 1..89: mol_type = other RNA
aaaaaaaaaaaaaaataaaaaaaaaaaaaataaataaatataaaaaaaaaaaaaaaataaataaataaatataaataaataaatatata

SEQ ID NO: 13039 - RNA, 89 nt, synthetic construct
  source 1..89: mol_type = other RNA
aaaaaaaatatataaaaaataaataaataaataaataaatataaaaaaaaaaaaaaaaaaaaaaaaaaaaaaataaataaataaatata

SEQ ID NO: 13040 - RNA, 89 nt, synthetic construct
  source 1..89: mol_type = other RNA
aaaaaaaatataaataaaaaaaaaaaataaataaataaatatataaataaaaaaaaaaaaaaaaaaaaaaaaataaataaataaatata

SEQ ID NO: 13041 - RNA, 89 nt, synthetic construct
  source 1..89: mol_type = other RNA
aaaaaaaaaaaaaaaaataaataaataaatataaataaataaaaaataaataaatatataaataaaaaaaaaaaaaaaaaaaaaatata

SEQ ID NO: 13042 - RNA, 89 nt, synthetic construct
  source 1..89: mol_type = other RNA
aaaaaaaaaaaaataaataaataaataaatataaataaaaaaaaaataaataaatatataaataaaaaaaaaaaaaaaaaaaaaatata

SEQ ID NO: 13043 - RNA, 89 nt, synthetic construct
  source 1..89: mol_type = other RNA
aaaaaaaaaaaaaaataaataaaaaaaaaataaataaatataaaaaaaaaaaaaaaataaataaataaatataaataaataaatatata

SEQ ID NO: 13044 - RNA, 89 nt, synthetic construct
  source 1..89: mol_type = other RNA
aaaaaaaaaataaaaaaaaaaaaaaaataaataaataaatatataaataaataaatataaaaaaaaaaaaaaataaataaataaatata

SEQ ID NO: 13045 - RNA, 89 nt, synthetic construct
  source 1..89: mol_type = other RNA
aaaaaaaaaaaaataaataaataaataaatataaataaataaaaaataaataaatatataaataaaaaaaaaaaaaaaaaaaaaatata

SEQ ID NO: 13046 - RNA, 89 nt, synthetic construct
  source 1..89: mol_type = other RNA
aaaaaaaaataaataaataaataaataaatataaataaaaaaaaaataaataaatatataaataaaaaaaaaaaaaaaaaaaaaatata

SEQ ID NO: 13047 - RNA, 89 nt, synthetic construct
  source 1..89: mol_type = other RNA
aaaaaaaaaataaataaaaaaaaaaaataaataaataaatatataaataaataaatataaaaaaaaaaaaaaataaataaataaatata

SEQ ID NO: 13048 - RNA, 89 nt, synthetic construct
  source 1..89: mol_type = other RNA
aaaaaaaaataaataaataaataaataaatataaataaataaaaaataaataaatatataaataaaaaaaaaaaaaaaaaaaaaatata

SEQ ID NO: 13049 - RNA, 89 nt, synthetic construct
  source 1..89: mol_type = other RNA
aaaaataaataaataaataaataaataaatataaataaaaaaaaaataaataaatatataaataaaaaaaaaaaaaaaaaaaaaatata

SEQ ID NO: 13050 - RNA, 90 nt, synthetic construct
  source 1..90: mol_type = other RNA
aaaaaaaaaaaaaaaaaaaaaaaaaaaaaaaaaataaaaaaaataaataaataaaaaaaaaaaaaaaaaaaaaaaaaaaaaataaatata

SEQ ID NO: 13051 - RNA, 90 nt, synthetic construct
  source 1..90: mol_type = other RNA
aaaaaaaaaaaaaaaaaaaaaaaaaaaaaaaaaataaaataaataaataaataaaaaaaaaaaaaaaaaaaaaaaaaaaaaataaatata

SEQ ID NO: 13052 - RNA, 90 nt, synthetic construct
  source 1..90: mol_type = other RNA
aaaaaaaaaaaaaaaaaaaaaaaaaaaaaaaaaataaaataaataaataaataaataaaaaaaaaaaaaaaaaaaaaaaaaataaatata

SEQ ID NO: 13053 - RNA, 90 nt, synthetic construct
  source 1..90: mol_type = other RNA
aaaaaaaaaaaaaaaaaaaaaaaaaaaaaaaatataaaaaaaataaataaataaaaaaaaaaaaaaaaaaaaaaaaaaaaaataaatata

SEQ ID NO: 13054 - RNA, 90 nt, synthetic construct
  source 1..90: mol_type = other RNA
aaaaaaaaaaaaaaaaaaaataaataaataaaaaaaaaaaaaaaaaaaaaaaaaataaataaataaaaaaaaaaaaaaaaaaaaaaataa

SEQ ID NO: 13055 - RNA, 90 nt, synthetic construct
  source 1..90: mol_type = other RNA
aaaaaaaaaaaaaaaaaaaataaataaataaaaaaaaaaaaaaaaaaaaaaaaaataaataaataaaaaaaaaaaaaaaaaaataaataa

SEQ ID NO: 13056 - RNA, 90 nt, synthetic construct
  source 1..90: mol_type = other RNA
aaaaaaaaaaaaaaaaaaaaaaaaaaaaaaaaaatataataaataaataaataaataaaaaaaaaaaaaaaaaaaaaaaaaataaatata

SEQ ID NO: 13057 - RNA, 90 nt, synthetic construct
  source 1..90: mol_type = other RNA
aaaaaaaaaaaaaaaaaaaataaataaataaaaaaaaaaaaaaaaaaaaaaaatataaataaataaaaaaaaaaaaaaaaaaaaaaataa

SEQ ID NO: 13058 - RNA, 90 nt, synthetic construct
  source 1..90: mol_type = other RNA
aaaaaaaaaaaaaaaaaaaataaataaataaaaaaaaaaaaaaaaaaaaaaaatataaataaataaataaaaaaaaaaaaaaaaaaataa

SEQ ID NO: 13059 - RNA, 90 nt, synthetic construct
  source 1..90: mol_type = other RNA
aaaaaaaaaaaaaaaaaaaataaataaataaataaaaaaaaaaaaaaaaaaaatataaataaataaataaaaaaaaaaaaaaaaaaataa

SEQ ID NO: 13060 - RNA, 90 nt, synthetic construct
  source 1..90: mol_type = other RNA
aaaaaaaaaaaaaaaaaaaataaataaataaataaataaaaaaaaaaaaaaaatataaataaataaataaaaaaaaaaaaaaaaaaataa

SEQ ID NO: 13061 - RNA, 90 nt, synthetic construct
  source 1..90: mol_type = other RNA
aaaaaaaaaaaaaaaaaaaaaaaaaaaaaaaaaataaaataaataaataaataaataaaaaaaaaaaaaaaaaaaaaaaaaatatatata

SEQ ID NO: 13062 - RNA, 90 nt, synthetic construct
  source 1..90: mol_type = other RNA
aaaaaaaaaaaaaaaaaaaataaataaataaataaataaaaaaaaaaaaaaaatataaataaataaataaaaaaaaaaaaaaaaaaatat

SEQ ID NO: 13063 - RNA, 90 nt, synthetic construct
  source 1..90: mol_type = other RNA
aaaaaaaaaaaaaaaaaaaaaaaaaaaaaaaaaatataataaataaataaataaatataaaaaaaaaaaaaaaaaaaaaaaataaatata

SEQ ID NO: 13064 - RNA, 90 nt, synthetic construct
  source 1..90: mol_type = other RNA
aaaaaaaaaaaaaaaaaaaaaataaaaaaaaaaataaaaaaaataaataaataaaaaaaaaaaaaaaaaaaaaaaaaaaaaataaatata

SEQ ID NO: 13065 - RNA, 90 nt, synthetic construct
  source 1..90: mol_type = other RNA
aaaaaaaaaaaaaataaaaaaaaaaaaaaaaaaataaaataaataaataaataaaaaaaaaaaaaaaaaaaaaaaaaaaaaataaatata

SEQ ID NO: 13066 - RNA, 90 nt, synthetic construct
  source 1..90: mol_type = other RNA
aaaaaaaaaaaaaaaaaaaaaaaataaaaaaaaataaaataaataaataaataaaaaaaaaaaaaaaaaaaaaaaaaaaaaataaatata

SEQ ID NO: 13067 - RNA, 90 nt, synthetic construct
  source 1..90: mol_type = other RNA
aaataaaaaaaaaaaaaaaaaaaaaaaaaaaaaatataataaataaataaataaataaaaaaaaaaaaaaaaaaaaaaaaaataaatata

SEQ ID NO: 13068 - RNA, 90 nt, synthetic construct
  source 1..90: mol_type = other RNA
aaaaaaaaaaaaaaaaaaaaaaaaaaaaaaaaaataaaataaataaataaataaataaaaaaaaaaaaaaaaaaataaaaaataaatata

SEQ ID NO: 13069 - RNA, 90 nt, synthetic construct
  source 1..90: mol_type = other RNA
aaaaaaaaaaaaaaaaaaaaaaaaaaaaaaaaaataaaataaataaataaataaataaaaaaataaaaaaaaaaaaaaaaaataaatata

SEQ ID NO: 13070 - RNA, 90 nt, synthetic construct
  source 1..90: mol_type = other RNA
aaaaaaaaaaaaaaaaaaaaaaaaaaaaaaaaaataaaataaataaataaataaataaaaaaaaataaaaaaaaaaaaaaaataaatata

SEQ ID NO: 13071 - RNA, 90 nt, synthetic construct
  source 1..90: mol_type = other RNA
aaaaaaaaaaaaaaaaaaaaataaatataaataaatataaataaataaataaatatataaaaaaaaaaaaaaaaaaaaaaaaaaaataaa

SEQ ID NO: 13072 - RNA, 90 nt, synthetic construct
  source 1..90: mol_type = other RNA
aaaaaaaataaatataaaaaaaaaaaaaaaaaaaaaaaaaaaaaaaaaaataaaaaaaaaaaaaaataaataaatatataaataaatata

SEQ ID NO: 13073 - RNA, 90 nt, synthetic construct
  source 1..90: mol_type = other RNA
aaaaaaaataaatataaaaaaaaaaaaaaaaaaaaaaaaaaaaaaataaataaaaaaaaaaaaaaataaataaatatataaataaatata

SEQ ID NO: 13074 - RNA, 90 nt, synthetic construct
  source 1..90: mol_type = other RNA
aaaaaaaataaatataaataaaaaaaaaaaaaaaaaaaaaaaaaaaaaaataaaaaaaaaaaaaaataaataaatatataaataaatata

SEQ ID NO: 13075 - RNA, 90 nt, synthetic construct
  source 1..90: mol_type = other RNA
aaaaaaaataaatataaataaaaaaaaaaaaaaaaaaaaaaaaaaataaataaaaaaaaaaaaaaataaataaatatataaataaatata

SEQ ID NO: 13076 - RNA, 90 nt, synthetic construct
  source 1..90: mol_type = other RNA
aaaaaaaataaatataaataaaaaaaaaaaaaaaaaaaaaaaaaaaaaaataaaaaaaaaaataaataaataaatatataaataaatata

SEQ ID NO: 13077 - RNA, 90 nt, synthetic construct
  source 1..90: mol_type = other RNA
aaaaaaaataaatataaaaaaaaaaaaaaaaaaaaaaaaaaaaaaataaataaaaaaaaaaataaataaataaatatataaataaatata

SEQ ID NO: 13078 - RNA, 90 nt, synthetic construct
  source 1..90: mol_type = other RNA
aaaaaaaataaatataaataaaaaaaaaaaaaaaaaaaaaaaaaaataaataaaaaaaaaaataaataaataaatatataaataaatata

SEQ ID NO: 13079 - RNA, 90 nt, synthetic construct
  source 1..90: mol_type = other RNA
aaaaaaaaaaaaaaaaaaaaaaaaaaaaaaaaaataataaaaataaataaataaaaaaaaaaaaaaaaaaaaaaaaaaaaaataaatata

SEQ ID NO: 13080 - RNA, 90 nt, synthetic construct
  source 1..90: mol_type = other RNA
aaaaaaaaaaaaaaaaaaaaaaaaaaaaaaataataaaataaataaataaataaaaaaaaaaaaaaaaaaaaaaaaaaaaaataaatata

SEQ ID NO: 13081 - RNA, 90 nt, synthetic construct
  source 1..90: mol_type = other RNA
aaataaaaaaaaaaaaaaaaaaaaaaaaaaaaaatataataaataaataaataaatataaaaaaaaaaaaaaaaaaaaaaaataaatata

SEQ ID NO: 13082 - RNA, 90 nt, synthetic construct
  source 1..90: mol_type = other RNA
aaataaaaaaaaaaaaaaaaaaaaaaaaaaaaaatataataaataaataaataaatataaataaaaaaaaaaaaaaaaaaaataaatata

SEQ ID NO: 13083 - RNA, 90 nt, synthetic construct
  source 1..90: mol_type = other RNA
aaataaaaaaaaaaaaaaaaaaaaaaaaaaaaaatataataaataaataaataaatataaaaaaaaaaaaaaaaaaaataaataaatata

SEQ ID NO: 13084 - RNA, 90 nt, synthetic construct
  source 1..90: mol_type = other RNA
aaaaaaaaaaaaaaaaaaaataaataaataaaaaaaaaaaaaaaaaaaaaaaatataaataaataaataaaaaaaaaaaaaaaaaaaaaa

SEQ ID NO: 13085 - RNA, 90 nt, synthetic construct
  source 1..90: mol_type = other RNA
aaataaaaaaaaaaaaaaaaaaaaaaaaaaaaaatataataaataaataaataaatataaataaaaaaaaaaaaaaaataaataaatata

SEQ ID NO: 13086 - RNA, 90 nt, synthetic construct
  source 1..90: mol_type = other RNA
aaaaaaaaaaaaaaaaaaaataaataaataaataaaaaaaaaaaaaaaaaaaatataaataaataaataaaaaaaaaaaaaaaaaaaaaa

SEQ ID NO: 13087 - RNA, 90 nt, synthetic construct
  source 1..90: mol_type = other RNA
aaaaaaaaaaaaaaaaaaatataaatataaataaatataaataaataaataaatatataaaaaaaaaaaaaaaaaaaaaaaaaaaataaa

SEQ ID NO: 13088 - RNA, 90 nt, synthetic construct
  source 1..90: mol_type = other RNA
aaaaaaaaaaaaaaaaaaaataaataaataaataaataaaaaaaaaaaaaaaatataaataaataaataaaaaaaaaaaaaaaaaaaaaa

SEQ ID NO: 13089 - RNA, 90 nt, synthetic construct
  source 1..90: mol_type = other RNA
aaaaaaaaaaaaaaaaaaaataaataaataaaaaaaaaaataaaaaaaaaaaaaataaataaataaaaaaaaaaaaaaaaaaaaaaataa

SEQ ID NO: 13090 - RNA, 90 nt, synthetic construct
  source 1..90: mol_type = other RNA
aaaaaaaaaaaaaaaaaaaataaataaataaaaaaaaaaaaaaataaaaaaaaaataaataaataaaaaaaaaaaaaaaaaaaaaaataa

SEQ ID NO: 13091 - RNA, 90 nt, synthetic construct
  source 1..90: mol_type = other RNA
aaaaaaaaaaaaaaaaaaaataaataaataaaaaaaaaaaaaaaaataaaaaaaataaataaataaaaaaaaaaaaaaaaaaaaaaataa

SEQ ID NO: 13092 - RNA, 90 nt, synthetic construct
  source 1..90: mol_type = other RNA
taaaaaaaaaaataaaaaaaaaaaaaaaaaaaaaaaaaaaaaaaaaaaaaaaataaaaaaaaaaaaaaaaaaaaaaaaaaaaaaaatata

SEQ ID NO: 13093 - RNA, 90 nt, synthetic construct
  source 1..90: mol_type = other RNA
taaataaaaaaataaaaaaaaaaaaaaaaaaaaaaaaaaaaaaaaaaaaaaaataaaaaaaaaaaaaaaaaaaaaaaaaaaaaaaatata

SEQ ID NO: 13094 - RNA, 90 nt, synthetic construct
  source 1..90: mol_type = other RNA
taaaaaaaaaaataaataaaaaaaaaaaaaaaaaaaaaaaaaaaaaaaaaaaataaaaaaaaaaaaaaaaaaaaaaaaaaaaaaaatata

SEQ ID NO: 13095 - RNA, 90 nt, synthetic construct
  source 1..90: mol_type = other RNA
aaaaaaaataaatataaaaaaaaaaaaaaaaaaaaaaaaaaaaaaaaaaataaaaaaaaaaaaatataaataaatatataaataaatata

SEQ ID NO: 13096 - RNA, 90 nt, synthetic construct
  source 1..90: mol_type = other RNA
aaaaaaaataaatataaataaaaaaaaaaaaaaaaaaaaaaaaaaaaaaataaaaaaaaaaaaatataaataaatatataaataaatata

SEQ ID NO: 13097 - RNA, 90 nt, synthetic construct
  source 1..90: mol_type = other RNA
aaaaaaaataaatataaataaaaaaaaaaaaaaaaaaaaaaaaaaaaaaataaaaaaaaatataaataaataaatatataaataaatata

SEQ ID NO: 13098 - RNA, 90 nt, synthetic construct
  source 1..90: mol_type = other RNA
aaaaaaaataaatataaaaaaaaaaaaaaaaaaaaaaaaaaaaaaataaataaaaaaaaatataaataaataaatatataaataaatata

SEQ ID NO: 13099 - RNA, 90 nt, synthetic construct
  source 1..90: mol_type = other RNA
aaaaaaaaaaaaaaaaaaaaatataaataaaatataaataaataaataaataaaaaaaaaaaaaaaaaaaaaaaaaaaaaatataaataa

SEQ ID NO: 13100 - RNA, 90 nt, synthetic construct
  source 1..90: mol_type = other RNA
aaaaaaaataaatataaataaaaaaaaaaaaaaaaaaaaaaaaaaataaataaaaaaaaatataaataaataaatatataaataaatata

SEQ ID NO: 13101 - RNA, 90 nt, synthetic construct
  source 1..90: mol_type = other RNA
aaaaaaaaaaaaaaaaataaatataaataaaatataaataaataaataaataaaaaaaaaaaaaaaaaaaaaaaaaaaaaatataaataa

SEQ ID NO: 13102 - RNA, 90 nt, synthetic construct
  source 1..90: mol_type = other RNA
aaataaaataaatataaaaaaaaaaaaaaaaaaaaaaaaaaaaaaaaaaataaaaaaaaaaaaaaataaataaatatataaataaatata

SEQ ID NO: 13103 - RNA, 90 nt, synthetic construct
  source 1..90: mol_type = other RNA
aaaaaaataaaaaaaaaaaaaaaaaaaaaaaaaatataataaataaataaataaataaaaaaaaaaaaaaaaaaaaaaaaaataaatata

SEQ ID NO: 13104 - RNA, 90 nt, synthetic construct
  source 1..90: mol_type = other RNA
aaaaaaaaaaaaaaaaaaaataaataaataaaaaaaaaaaaaaaaaaaaaaaaaataaataaataaaaaaaaaaaaaaaaaaaaaaatac

SEQ ID NO: 13105 - RNA, 90 nt, synthetic construct
  source 1..90: mol_type = other RNA
aaaaaaaataaatatataaaaaaaaaaaaaaaaaaaaaaaaaaaaaaaaataaaaaaaaaaaaaaataaataaatatataaataaatata

SEQ ID NO: 13106 - RNA, 90 nt, synthetic construct
  source 1..90: mol_type = other RNA
aaaaaaaaaaaaaaaaaaaataaataaataaataaaaaaaaaaaaaaaaaaaatataaatatataaataaaaaaaaaaaaaaaaaaataa

SEQ ID NO: 13107 - RNA, 90 nt, synthetic construct
  source 1..90: mol_type = other RNA
aaaaaaaaaaaaaaaaaaaataaataaataaataaataaaaaaaaaaaaaaaatataaatatataaataaaaaaaaaaaaaaaaaaataa

SEQ ID NO: 13108 - RNA, 90 nt, synthetic construct
  source 1..90: mol_type = other RNA
aaaaaaaataaatataaaaaaaaaaaaaaaaaaaaaaaaaaaaaaaaaaataaaaaaaaaaaaaaataaataaatatataaataaataaa

SEQ ID NO: 13109 - RNA, 90 nt, synthetic construct
  source 1..90: mol_type = other RNA
aaaaaaaataaatataaataaaaaaaaaaaaaaaaaaaaaaaaaaaaaaataaaaaaaaaaaaaaataaataaatatataaataaataaa

SEQ ID NO: 13110 - RNA, 90 nt, synthetic construct
  source 1..90: mol_type = other RNA
aaaaaaaataaatataaaaaaaaaaaaaaaaaaaaaaaaaaaaaaataaataaaaaaaaaaaaaaataaataaatatataaataaataaa

SEQ ID NO: 13111 - RNA, 90 nt, synthetic construct
  source 1..90: mol_type = other RNA
aaaaaaaataaatataaaaaaaaaaaaaaaaaaaaaaaaaaaaaaaaaaataaaaaaaaaaataaataaataaatatataaataaataaa

SEQ ID NO: 13112 - RNA, 90 nt, synthetic construct
  source 1..90: mol_type = other RNA
aaaaaaaataaatataaataaaaaaaaaaaaaaaaaaaaaaaaaaataaataaaaaaaaaaaaaaataaataaatatataaataaataaa

SEQ ID NO: 13113 - RNA, 90 nt, synthetic construct
  source 1..90: mol_type = other RNA
aaaaaaaataaatataaataaaaaaaaaaaaaaaaaaaaaaaaaaaaaaataaaaaaaaaaataaataaataaatatataaataaataaa

SEQ ID NO: 13114 - RNA, 90 nt, synthetic construct
  source 1..90: mol_type = other RNA
aaaaaaaataaatataaaaaaaaaaaaaaaaaaaaaaaaaaaaaaataaataaaaaaaaaaataaataaataaatatataaataaataaa

SEQ ID NO: 13115 - RNA, 90 nt, synthetic construct
  source 1..90: mol_type = other RNA
aaaaaaaataaatataaataaaaaaaaaaaaaaaaaaaaaaaaaaataaataaaaaaaaaaataaataaataaatatataaataaataaa

SEQ ID NO: 13116 - RNA, 90 nt, synthetic construct
  source 1..90: mol_type = other RNA
aaaaaaaaaaaaaaaaaaaaaaaaaaaaaaaaaataaaataaataaataaataaaaaaaaaaaaaaaaaaaaaaaaaaaaaataaaaata

SEQ ID NO: 13117 - RNA, 90 nt, synthetic construct
  source 1..90: mol_type = other RNA
aaaaaaaataaatataaaaaaaaaaaaaaaaaaaaaaaaaaaaaaaaaaataaaaaaaaaaaaaaataaataaatataaaaataaatata

SEQ ID NO: 13118 - RNA, 90 nt, synthetic construct
  source 1..90: mol_type = other RNA
aaataaaaaaaaaaaaaaaaaaaaaaaaaaaaaatataataaataaataaataaatataaatataaaaaaaaaaaaaaaaaataaatata

SEQ ID NO: 13119 - RNA, 90 nt, synthetic construct
  source 1..90: mol_type = other RNA
aaataaaaaaaaaaaaaaaaaaaaaaaaaaaaaatataataaataaataaataaatataaatataaaaaaaaaaaaaataaataaatata

SEQ ID NO: 13120 - RNA, 90 nt, synthetic construct
  source 1..90: mol_type = other RNA
aaaaaaaaaaaaaaaaaaaataaataaataaaaaaataaaaaaaaaaaaaaaatataaataaataaaaaaaaaaaaaaaaaaaaaaataa

SEQ ID NO: 13121 - RNA, 90 nt, synthetic construct
  source 1..90: mol_type = other RNA
aaaaaaaaaaaataaaaaaataaataaataaaaaaaaaaaaaaaaaaaaaaaatataaataaataaataaaaaaaaaaaaaaaaaaataa

SEQ ID NO: 13122 - RNA, 90 nt, synthetic construct
  source 1..90: mol_type = other RNA
aaaaaaaaaaaaaaaaaaaataaataaataaaaaaaaaaaaataaaaaaaaaatataaataaataaataaaaaaaaaaaaaaaaaaataa

SEQ ID NO: 13123 - RNA, 90 nt, synthetic construct
  source 1..90: mol_type = other RNA
aaaaaaaaaaaaaaaaaaaataaataaataaaaaaaaaaaaaaaaaaaaaaaatataaataaataaataaaaaaaataaaaaaaaaataa

SEQ ID NO: 13124 - RNA, 90 nt, synthetic construct
  source 1..90: mol_type = other RNA
aaaaaaaaaaataaaaaaaataaataaataaaaaaaaaaaaaaaaaaaaaaaatataaataaataaataaaaaaaaaaaaaaaaaaataa

SEQ ID NO: 13125 - RNA, 90 nt, synthetic construct
  source 1..90: mol_type = other RNA
aaaaaaaaaataaaaaaaaataaataaataaaaaaaaaaaaaaaaaaaaaaaatataaataaataaataaaaaaaaaaaaaaaaaaataa

SEQ ID NO: 13126 - RNA, 90 nt, synthetic construct
  source 1..90: mol_type = other RNA
aaaaaaaaaaaaaaaaaaaataaataaataaaaaaataaaaaaaaaaaaaaaatataaataaataaataaaaaaaaaaaaaaaaaaataa

SEQ ID NO: 13127 - RNA, 90 nt, synthetic construct
  source 1..90: mol_type = other RNA
aaaaaaaaaaaaaaaaaaaataaataaataaataaaaaaaaaaataaaaaaaatataaataaataaataaaaaaaaaaaaaaaaaaataa

SEQ ID NO: 13128 - RNA, 90 nt, synthetic construct
  source 1..90: mol_type = other RNA
aaaaaaaaaaaataaaaaaataaataaataaataaaaaaaaaaaaaaaaaaaatataaataaataaataaaaaaaaaaaaaaaaaaataa

SEQ ID NO: 13129 - RNA, 90 nt, synthetic construct
  source 1..90: mol_type = other RNA
aaaataaaaaaaaaaaaaaataaataaataaataaaaaaaaaaaaaaaaaaaatataaataaataaataaaaaaaaaaaaaaaaaaataa

SEQ ID NO: 13130 - RNA, 90 nt, synthetic construct
  source 1..90: mol_type = other RNA
aaaataaataaaaaaaaaaataaataaataaaaaaaaaaaaaaaaaaaaaaaatataaataaataaataaaaaaaaaaaaaaaaaaataa

SEQ ID NO: 13131 - RNA, 90 nt, synthetic construct
  source 1..90: mol_type = other RNA
aaaaaaaataaaaaaaaaaataaataaataaataaaaaaaaaaaaaaaaaaaatataaataaataaataaaaaaaaaaaaaaaaaaataa

SEQ ID NO: 13132 - RNA, 90 nt, synthetic construct
  source 1..90: mol_type = other RNA
aaaaaaaaaaaataaaaaaataaataaataaataaataaaaaaaaaaaaaaaatataaataaataaataaaaaaaaaaaaaaaaaaataa

SEQ ID NO: 13133 - RNA, 90 nt, synthetic construct
  source 1..90: mol_type = other RNA
aaaaaaaataaataaaaaaataaataaataaataaaaaaaaaaaaaaaaaaaatataaataaataaataaaaaaaaaaaaaaaaaaataa

SEQ ID NO: 13134 - RNA, 90 nt, synthetic construct
  source 1..90: mol_type = other RNA
aaaataaataaataaaaaaataaataaataaaaaaaaaaaaaaaaaaaaaaaatataaataaataaataaaaaaaaaaaaaaaaaaataa

SEQ ID NO: 13135 - RNA, 90 nt, synthetic construct
  source 1..90: mol_type = other RNA
aaaataaataaaaaaaaaaataaataaataaataaaaaaaaaaaaaaaaaaaatataaataaataaataaaaaaaaaaaaaaaaaaataa

SEQ ID NO: 13136 - RNA, 90 nt, synthetic construct
  source 1..90: mol_type = other RNA
aaaataaaaaaaaaaaaaaataaataaataaataaataaaaaaaaaaaaaaaatataaataaataaataaaaaaaaaaaaaaaaaaataa

SEQ ID NO: 13137 - RNA, 90 nt, synthetic construct
  source 1..90: mol_type = other RNA
aaaataaataaataaaaaaataaataaataaataaaaaaaaaaaaaaaaaaaatataaataaataaataaaaaaaaaaaaaaaaaaataa

SEQ ID NO: 13138 - RNA, 90 nt, synthetic construct
  source 1..90: mol_type = other RNA
aaaaaaaataaataaaaaaataaataaataaataaataaaaaaaaaaaaaaaatataaataaataaataaaaaaaaaaaaaaaaaaataa

SEQ ID NO: 13139 - RNA, 90 nt, synthetic construct
  source 1..90: mol_type = other RNA
aaaataaataaataaaaaaataaataaataaataaataaaaaaaaaaaaaaaatataaataaataaataaaaaaaaaaaaaaaaaaataa

SEQ ID NO: 13140 - RNA, 90 nt, synthetic construct
  source 1..90: mol_type = other RNA
aaaaaaaaaaaaaaaaataaatataaataaaatataaataaataaataaatataaaaaaaaaaaaaaaaaaaaaaaaaaaatataaataa

SEQ ID NO: 13141 - RNA, 90 nt, synthetic construct
  source 1..90: mol_type = other RNA
taaaaaaaaaaataaaaaaaaaaaaaaaaaaaaaaaaaaaaaaaaaaaaaaaataaaaaaaaaaaaaaaaaaaaaaaaaaaaaatatata

SEQ ID NO: 13142 - RNA, 90 nt, synthetic construct
  source 1..90: mol_type = other RNA
aaaaaaaaatataaatataaatataaatataaataaataaataaataaataaaaaaaaaaaaataaaaaaaaaaaaaaaaaaaaaaataa

SEQ ID NO: 13143 - RNA, 90 nt, synthetic construct
  source 1..90: mol_type = other RNA
aaataaaaaaaaaaaaaaaaaaaaaaaaaaaaaatataaaaaataaatatataaatataaataaaaaaaaaaaaaaaaaaaataaatata

SEQ ID NO: 13144 - RNA, 90 nt, synthetic construct
  source 1..90: mol_type = other RNA
caaaaaaaaaaataaaaaaaaaaaaaaaaaaaaaaaaaaaaaaaaaaaaaaaataaaaaaaaaaaaaaaaaaaaaaaaaaaaaaaatata

SEQ ID NO: 13145 - RNA, 90 nt, synthetic construct
  source 1..90: mol_type = other RNA
aaaaaaaaaaaataaaaaaataaataaataaataaaaaaaaaaaaaaaaaaaatataaataaataaataaaaaaaaaaaaaaaaaaatat

SEQ ID NO: 13146 - RNA, 90 nt, synthetic construct
  source 1..90: mol_type = other RNA
aaaaaaaaatataaatataaatataaatataaataaataaataaataaataaaaaaaaataaataaaaaaaaaaaaaaaaaaaaaaataa

SEQ ID NO: 13147 - RNA, 90 nt, synthetic construct
  source 1..90: mol_type = other RNA
aaaaaaaaaaaataaaaaaataaataaataaataaataaaaaaaaaaaaaaaatataaataaataaataaaaaaaaaaaaaaaaaaatat

SEQ ID NO: 13148 - RNA, 90 nt, synthetic construct
  source 1..90: mol_type = other RNA
aaaaaaaataaataaaaaaataaataaataaataaaaaaaaaaaaaaaaaaaatataaataaataaataaaaaaaaaaaaaaaaaaatat

SEQ ID NO: 13149 - RNA, 90 nt, synthetic construct
  source 1..90: mol_type = other RNA
aaaataaataaataaaaaaataaataaataaataaaaaaaaaaaaaaaaaaaatataaataaataaataaaaaaaaaaaaaaaaaaatat

SEQ ID NO: 13150 - RNA, 90 nt, synthetic construct
  source 1..90: mol_type = other RNA
aaaaaaaataaataaaaaaataaataaataaataaataaaaaaaaaaaaaaaatataaataaataaataaaaaaaaaaaaaaaaaaatat

SEQ ID NO: 13151 - RNA, 91 nt, synthetic construct
  source 1..91: mol_type = other RNA
aaaaaaaaaaaaaaataaaaaaaaaaaaaaaaaaaaaaataaataaataaatataaaaaaaaaaaaaaaaaaaaaaaaaaaaaaaaatata

SEQ ID NO: 13152 - RNA, 91 nt, synthetic construct
  source 1..91: mol_type = other RNA
aaaaaaaaaaaaaataaataaataaaaaaaaaaaaaaaaaaaaaaaaataaaaaaaaaaaaaaaaaaaaaaaataaatataaataaatata

SEQ ID NO: 13153 - RNA, 91 nt, synthetic construct
  source 1..91: mol_type = other RNA
aaaaaaaaaaaaaataaataaataaaaaaaaaaaaaaaaaaaaaaaaataaataaaaaaaaaaaaaaaaaaaataaatataaataaatata

SEQ ID NO: 13154 - RNA, 91 nt, synthetic construct
  source 1..91: mol_type = other RNA
aaaaaaaaaaaaaataaataaataaataaaaaaaaaaaaaaaaaaaaataaaaaaaaaaaaaaaaaaaaaaaataaatataaataaatata

SEQ ID NO: 13155 - RNA, 91 nt, synthetic construct
  source 1..91: mol_type = other RNA
aaaaaaaaaaaaaataaataaataaaaaaaaaaaaaaaaaaaaataaataaaaaaaaaaaaaaaaaaaaaaaataaatataaataaatata

SEQ ID NO: 13156 - RNA, 91 nt, synthetic construct
  source 1..91: mol_type = other RNA
aaaaaaaaaataaataaataaataaaaaaaaaaaaaaaaaaaaaaaaataaaaaaaaaaaaaaaaaaaaaaaataaatataaataaatata

SEQ ID NO: 13157 - RNA, 91 nt, synthetic construct
  source 1..91: mol_type = other RNA
aaaaaaaaaaaaaataaataaataaataaaaaaaaaaaaaaaaaaaaataaataaaaaaaaaaaaaaaaaaaataaatataaataaatata

SEQ ID NO: 13158 - RNA, 91 nt, synthetic construct
  source 1..91: mol_type = other RNA
aaaaaaaaaaaaaaaaaaaaaaaaaaaaaaaaaaaaaaaaataaatataaataaatataaataaaaaaaaaaaaaaaataaataaatataa

SEQ ID NO: 13159 - RNA, 91 nt, synthetic construct
  source 1..91: mol_type = other RNA
aaaaaaaaaaaaaaaaaaaaaaaaaaaaaaaaaaaaaaaaataaatataaataaatataaataaaaaaaaaaaataaataaataaatataa

SEQ ID NO: 13160 - RNA, 91 nt, synthetic construct
  source 1..91: mol_type = other RNA
aaaaaaaaaaaaaaaaaaaaaaaaaaaaaaaaaaaaataaataaatataaataaatataaataaaaaaaaaaaaaaaataaataaatataa

SEQ ID NO: 13161 - RNA, 91 nt, synthetic construct
  source 1..91: mol_type = other RNA
aaaaaaaaaaaaaaaaaaaaaaaaaaaaaaaaaaaaaaaatataaatataaataaatataaaaaaaaaaaaaaaaaaaaaaaaaaaaatat

SEQ ID NO: 13162 - RNA, 91 nt, synthetic construct
  source 1..91: mol_type = other RNA
aaaaaaaaaaaaaataaataaataaaaaaaaaaaaaaaaaaaaaaatataaaaaaaaaaaaaaaaaaaaaaaataaatataaataaatata

SEQ ID NO: 13163 - RNA, 91 nt, synthetic construct
  source 1..91: mol_type = other RNA
aaaaaaaaaaaatataaataaataaaaaaaaaaaaaaaaaaaaaaaaataaaaaaaaaaaaaaaaaaaaaaaataaatataaataaatata

SEQ ID NO: 13164 - RNA, 91 nt, synthetic construct
  source 1..91: mol_type = other RNA
aaaaaaaaaaaaaataaataaataaaaaaaaaaaaaaaaaaaaaaaaataaaaaaaaaaaaaaaaaaaaaatataaatataaataaatata

SEQ ID NO: 13165 - RNA, 91 nt, synthetic construct
  source 1..91: mol_type = other RNA
aaaaaaaaaaaaaataaataaataaaaaaaaaaaaaaaaaaaaaaaaataaaaaaaaaaaaaaaaaataaatataaatataaataaatata

SEQ ID NO: 13166 - RNA, 91 nt, synthetic construct
  source 1..91: mol_type = other RNA
aaaaaaaaaaaaaataaataaataaaaaaaaaaaaaaaaaaaaaaaaataaataaaaaaaaaaaaaaaaaatataaatataaataaatata

SEQ ID NO: 13167 - RNA, 91 nt, synthetic construct
  source 1..91: mol_type = other RNA
aaaaaaaaaaaaaataaataaataaaaaaaaaaaaaaaaaaaaaaatataaataaaaaaaaaaaaaaaaaaaataaatataaataaatata

SEQ ID NO: 13168 - RNA, 91 nt, synthetic construct
  source 1..91: mol_type = other RNA
aaaaaaaaaaaaaataaataaataaataaaaaaaaaaaaaaaaaaatataaaaaaaaaaaaaaaaaaaaaaaataaatataaataaatata

SEQ ID NO: 13169 - RNA, 91 nt, synthetic construct
  source 1..91: mol_type = other RNA
aaaaaaaaaaaaaataaataaatataaaaaaaaaaaaaaaaaaaaaaataaataaaaaaaaaaaaaaaaaaaataaatataaataaatata

SEQ ID NO: 13170 - RNA, 91 nt, synthetic construct
  source 1..91: mol_type = other RNA
aaaaaaaaaaaatataaataaataaaaaaaaaaaaaaaaaaaaaaaaataaataaaaaaaaaaaaaaaaaaaataaatataaataaatata

SEQ ID NO: 13171 - RNA, 91 nt, synthetic construct
  source 1..91: mol_type = other RNA
aaaaaaaaaaaaaataaataaataaaaaaaaaaaaaaaaaaaaaaaaataaataaaaaaaaaaaaaataaatataaatataaataaatata

SEQ ID NO: 13172 - RNA, 91 nt, synthetic construct
  source 1..91: mol_type = other RNA
aaaaaaaaaaaaaataaataaataaataaaaaaaaaaaaaaaaaaaaataaataaaaaaaaaaaaaaaaaatataaatataaataaatata

SEQ ID NO: 13173 - RNA, 91 nt, synthetic construct
  source 1..91: mol_type = other RNA
aaaaaaaaaaaaaataaataaatataaataaaaaaaaaaaaaaaaaaataaataaaaaaaaaaaaaaaaaaaataaatataaataaatata

SEQ ID NO: 13174 - RNA, 91 nt, synthetic construct
  source 1..91: mol_type = other RNA
aaaaaaaaaaaaaataaataaataaataaaaaaaaaaaaaaaaaaatataaataaaaaaaaaaaaaaaaaaaataaatataaataaatata

SEQ ID NO: 13175 - RNA, 91 nt, synthetic construct
  source 1..91: mol_type = other RNA
aaaaaaaaaaaaaataaataaataaatataaataaaaaaaaaaaaaaataaataaaaaaaaaaaaaaaaaaaataaatataaataaatata

SEQ ID NO: 13176 - RNA, 91 nt, synthetic construct
  source 1..91: mol_type = other RNA
aaaaaaaaaaaaaataaataaatataaataaataaaaaaaaaaaaaaataaataaaaaaaaaaaaaaaaaaaataaatataaataaatata

SEQ ID NO: 13177 - RNA, 91 nt, synthetic construct
  source 1..91: mol_type = other RNA
aaaaaaaaaaaaaataaataaataaataaaaaaaaaaaaaaaaaaaaataaataaaaaaaaaaaaaataaatataaatataaataaatata

SEQ ID NO: 13178 - RNA, 91 nt, synthetic construct
  source 1..91: mol_type = other RNA
aaataaaaaaaaaaataaaaaaaaaaaaaaaaaaaaaaataaataaatataaataaaaaaaaaaaaaaaaaaaaaaaaaaaaaaaaatata

SEQ ID NO: 13179 - RNA, 91 nt, synthetic construct
  source 1..91: mol_type = other RNA
aaataaaaaaaaaaataaaaaaaaaaaaaaaaaaaaaaataaataaataaatataaaaaaaaaaaaaaaaaaaaaaaaaaaaaaaaatata

SEQ ID NO: 13180 - RNA, 91 nt, synthetic construct
  source 1..91: mol_type = other RNA
aaataaaaaaaaaaataaataaaaaaaaaaaaaaaaaaataaataaataaatataaaaaaaaaaaaaaaaaaaaaaaaaaaaaaaaatata

SEQ ID NO: 13181 - RNA, 91 nt, synthetic construct
  source 1..91: mol_type = other RNA
aaataaaaaaaaaaataaataaaaaaaaaaaaaaaaaaataaataaatataaataaaaaaaaaaaaaaaaaaaaaaaaaaaaaaaaatata

SEQ ID NO: 13182 - RNA, 91 nt, synthetic construct
  source 1..91: mol_type = other RNA
aaaaaaaaaaaaaataaataaataaaaaaaaaaaaaaaaaaaaaaaaataaaaaaaaaaaaaaaaaaaaaaaataaatataaataaataaa

SEQ ID NO: 13183 - RNA, 91 nt, synthetic construct
  source 1..91: mol_type = other RNA
aaaaaaaaaaaaaataaataaataaaaaaaaaaaaaaaaaaaaaaaaataaataaaaaaaaaaaaaaaaaaaataaatataaataaataaa

SEQ ID NO: 13184 - RNA, 91 nt, synthetic construct
  source 1..91: mol_type = other RNA
aaaaaaaaaaaaaataaataaataaataaaaaaaaaaaaaaaaaaaaataaaaaaaaaaaaaaaaaaaaaaaataaatataaataaataaa

SEQ ID NO: 13185 - RNA, 91 nt, synthetic construct
  source 1..91: mol_type = other RNA
aaaaaaaaaaaaaaaaaaaaaaaaaaaaaaaaaaaaaaaaaaaaaaaaaataaatatataaatataaataaataaataaaaaaaaaaaata

SEQ ID NO: 13186 - RNA, 91 nt, synthetic construct
  source 1..91: mol_type = other RNA
aaaaaaaaaaaaaaaaaaaaaaaaaaaaaaaaaaaaaaaaaaaaaataaataaatatataaatataaataaataaataaaaaaaaaaaata

SEQ ID NO: 13187 - RNA, 91 nt, synthetic construct
  source 1..91: mol_type = other RNA
aaaaaaaaaaaaaaaaaaaaaaaaaaaaaaaaaaaaaaaaataaatataaataaatataaatataaaaaaaaaaaaaataaataaatataa

SEQ ID NO: 13188 - RNA, 91 nt, synthetic construct
  source 1..91: mol_type = other RNA
aaaaaaataaaaaaaaaaaaaaaaaaaaataaaaaaaaaaaaaaaaaaaaaaaaaaaaaataaataaaaaaaaaaaaaaaaaaaaaatata

SEQ ID NO: 13189 - RNA, 91 nt, synthetic construct
  source 1..91: mol_type = other RNA
aaaaaaataaataaaaaaaaaaaaaaaaataaaaaaaaaaaaaaaaaaaaaaaaaaaaaataaataaaaaaaaaaaaaaaaaaaaaatata

SEQ ID NO: 13190 - RNA, 91 nt, synthetic construct
  source 1..91: mol_type = other RNA
aaaaaaataaaaaaaaaaaaaaaaaaaaataaaaaaaaaaaaaaaaaaaaaaaaaaaaaataaataaataaaaaaaaaaaaaaaaaatata

SEQ ID NO: 13191 - RNA, 91 nt, synthetic construct
  source 1..91: mol_type = other RNA
aaaaaaaaaaaaaataaataaataaaaaaaaaaaaaaaaaaaaaaaaataaaaaaaaaaaaaaaaaaaaaaaataaaaataaataaatata

SEQ ID NO: 13192 - RNA, 91 nt, synthetic construct
  source 1..91: mol_type = other RNA
aaaaaaaaaaaaaaaaaaaataaataaataaaaaaaaaaaataaataaataaaaaaaaaaaaaaaaaaaaaaaaaataaataaaaaatata

SEQ ID NO: 13193 - RNA, 91 nt, synthetic construct
  source 1..91: mol_type = other RNA
aaataaaaaaaaaaaaaaaaaaaaaaaaaaaaaaaaaaaatataaatataaataaatataaaaaaaaaaaaaaaaaaaaaaaaaaaaatat

SEQ ID NO: 13194 - RNA, 91 nt, synthetic construct
  source 1..91: mol_type = other RNA
aaaaaaaaaaaaaaaaaaaaaaaaaaaaaaaaaaaaaaaatataaatataaataaatataaaaaaaaaaaaaaaaaaaaaaaaaaatatat

SEQ ID NO: 13195 - RNA, 91 nt, synthetic construct
  source 1..91: mol_type = other RNA
aaaaaaaaaaaatataaataaataaaaaaaaaaaaaaaaaaaaaaatataaaaaaaaaaaaaaaaaaaaaaaataaatataaataaatata

SEQ ID NO: 13196 - RNA, 91 nt, synthetic construct
  source 1..91: mol_type = other RNA
aaaaaaaaaaaaaataaataaataaaaaaaaaaaaaaaaaaaaaaatataaaaaaaaaaaaaaaaaaaaaatataaatataaataaatata

SEQ ID NO: 13197 - RNA, 91 nt, synthetic construct
  source 1..91: mol_type = other RNA
aaaaaaaaaaaatataaataaataaaaaaaaaaaaaaaaaaaaaaaaataaaaaaaaaaaaaaaaaaaaaatataaatataaataaatata

SEQ ID NO: 13198 - RNA, 91 nt, synthetic construct
  source 1..91: mol_type = other RNA
aaaaaaaaaaaaaataaataaatataaaaaaaaaaaaaaaaaaaaatataaaaaaaaaaaaaaaaaaaaaaaataaatataaataaatata

SEQ ID NO: 13199 - RNA, 91 nt, synthetic construct
  source 1..91: mol_type = other RNA
aaaaaaaaaaaaaataaataaataaaaaaaaaaaaaaaaaaaaaaatataaaaaaaaaaaaaaaaaataaatataaatataaataaatata

SEQ ID NO: 13200 - RNA, 91 nt, synthetic construct
  source 1..91: mol_type = other RNA
aaaaaaaaaaaaaataaataaatataaataaaaaaaaaaaaaaaaatataaaaaaaaaaaaaaaaaaaaaaaataaatataaataaatata

SEQ ID NO: 13201 - RNA, 91 nt, synthetic construct
  source 1..91: mol_type = other RNA
aaaaaaaaaaaaaataaataaataaatataaaaaaaaaaaaaaaaatataaaaaaaaaaaaaaaaaaaaaaaataaatataaataaatata

SEQ ID NO: 13202 - RNA, 91 nt, synthetic construct
  source 1..91: mol_type = other RNA
aaaaaaaaaaaatataaataaataaaaaaaaaaaaaaaaaaaaaaaaataaataaaaaaaaaaaaaaaaaatataaatataaataaatata

SEQ ID NO: 13203 - RNA, 91 nt, synthetic construct
  source 1..91: mol_type = other RNA
aaaaaaaaaaaatataaataaataaaaaaaaaaaaaaaaaaaaaaaaataaaaaaaaaaaaaaaaaataaatataaatataaataaatata

SEQ ID NO: 13204 - RNA, 91 nt, synthetic construct
  source 1..91: mol_type = other RNA
aaaaaaaaaaaaaataaataaataaaaaaaaaaaaaaaaaaaaaaatataaataaaaaaaaaaaaaaaaaatataaatataaataaatata

SEQ ID NO: 13205 - RNA, 91 nt, synthetic construct
  source 1..91: mol_type = other RNA
aaaaaaaaaaaatataaataaataaaaaaaaaaaaaaaaaaaaaaatataaataaaaaaaaaaaaaaaaaaaataaatataaataaatata

SEQ ID NO: 13206 - RNA, 91 nt, synthetic construct
  source 1..91: mol_type = other RNA
aaaaaaaaaaaaaataaataaatataaaaaaaaaaaaaaaaaaaaatataaataaaaaaaaaaaaaaaaaaaataaatataaataaatata

SEQ ID NO: 13207 - RNA, 91 nt, synthetic construct
  source 1..91: mol_type = other RNA
aaatataaaaaaaaaaataaataaataaataaatataaatataaataaataaataaataaaaaaaaaaaaaaaaaaaaaaaaaaaaaatat

SEQ ID NO: 13208 - RNA, 91 nt, synthetic construct
  source 1..91: mol_type = other RNA
aaaaaaaaaaaaaataaataaataaatataaataaaaaaaaaaaaatataaaaaaaaaaaaaaaaaaaaaaaataaatataaataaatata

SEQ ID NO: 13209 - RNA, 91 nt, synthetic construct
  source 1..91: mol_type = other RNA
aaaaaaaaaaaaaataaataaataaaaaaaaaaaaaaaaaaaaaaatataaataaaaaaaaaaaaaataaatataaatataaataaatata

SEQ ID NO: 13210 - RNA, 91 nt, synthetic construct
  source 1..91: mol_type = other RNA
aaaaaaaaaaaaaataaataaatataaataaataaaaaaaaaaaaatataaaaaaaaaaaaaaaaaaaaaaaataaatataaataaatata

SEQ ID NO: 13211 - RNA, 91 nt, synthetic construct
  source 1..91: mol_type = other RNA
aaaaaaaaaaaaaataaataaatataaataaaaaaaaaaaaaaaaatataaataaaaaaaaaaaaaaaaaaaataaatataaataaatata

SEQ ID NO: 13212 - RNA, 91 nt, synthetic construct
  source 1..91: mol_type = other RNA
aaaaaaaaaaaatataaataaataaaaaaaaaaaaaaaaaaaaaaaaataaataaaaaaaaaaaaaataaatataaatataaataaatata

SEQ ID NO: 13213 - RNA, 91 nt, synthetic construct
  source 1..91: mol_type = other RNA
aaaaaaaaaaaaaataaataaataaataaaaaaaaaaaaaaaaaaatataaaaaaaaaaaaaaaaaataaatataaatataaataaatata

SEQ ID NO: 13214 - RNA, 91 nt, synthetic construct
  source 1..91: mol_type = other RNA
aaaaaaaaaaaaaataaataaataaatataaataaaaaaaaaaaaaaataaaaaaaaaaaaaaaaaataaatataaatataaataaatata

SEQ ID NO: 13215 - RNA, 91 nt, synthetic construct
  source 1..91: mol_type = other RNA
aaaaaaaaaaaaaataaataaataaatataaaaaaaaaaaaaaaaaaataaataaaaaaaaaaaaaataaatataaatataaataaatata

SEQ ID NO: 13216 - RNA, 91 nt, synthetic construct
  source 1..91: mol_type = other RNA
aaaaaaaaaaaaaataaataaataaataaaaaaaaaaaaaaaaaaatataaataaaaaaaaaaaaaataaatataaatataaataaatata

SEQ ID NO: 13217 - RNA, 91 nt, synthetic construct
  source 1..91: mol_type = other RNA
aaaaaaaaaaaaaataaataaataaatataaataaaaaaaaaaaaatataaataaaaaaaaaaaaaaaaaaaataaatataaataaatata

SEQ ID NO: 13218 - RNA, 91 nt, synthetic construct
  source 1..91: mol_type = other RNA
aaaaaaaaaaaatataaataaataaatataaataaaaaaaaaaaaaaataaataaaaaaaaaaaaaaaaaaaataaatataaataaatata

SEQ ID NO: 13219 - RNA, 91 nt, synthetic construct
  source 1..91: mol_type = other RNA
aaatataaaaaaaaataaaaaaaaaaaaaaaaaaaaaaataaataaataaatataaaaaaaaaaaaaaaaaaaaaaaaaaaaaaaaatata

SEQ ID NO: 13220 - RNA, 91 nt, synthetic construct
  source 1..91: mol_type = other RNA
aaataaaaaaaaaaataaaaaaaaaaaaaaaaaaaaatataaataaataaatataaaaaaaaaaaaaaaaaaaaaaaaaaaaaaaaatata

SEQ ID NO: 13221 - RNA, 91 nt, synthetic construct
  source 1..91: mol_type = other RNA
aaataaaaaaaaaaataaaaaaaaaaaaaaaaaaaaatataaataaatataaataaaaaaaaaaaaaaaaaaaaaaaaaaaaaaaaatata

SEQ ID NO: 13222 - RNA, 91 nt, synthetic construct
  source 1..91: mol_type = other RNA
aaatataaaaaaaaataaaaaaaaaaaaaaaaaaaaaaataaataaatataaataaaaaaaaaaaaaaaaaaaaaaaaaaaaaaaaatata

SEQ ID NO: 13223 - RNA, 91 nt, synthetic construct
  source 1..91: mol_type = other RNA
aaataaaaaaaaaaataaaaaaaaaaaaaaaaaaaaaaataaataaatataaatataaaaaaaaaaaaaaaaaaaaaaaaaaaaaaatata

SEQ ID NO: 13224 - RNA, 91 nt, synthetic construct
  source 1..91: mol_type = other RNA
aaaaaaaaaaaaaataaataaataaatataaataaaaaaaaaaaaaaataaataaaaaaaaaaaaaataaatataaatataaataaatata

SEQ ID NO: 13225 - RNA, 91 nt, synthetic construct
  source 1..91: mol_type = other RNA
aaaaaaaaaaaaaataaataaatataaataaataaaaaaaaaaaaaaataaataaaaaaaaaaaaaataaatataaatataaataaatata

SEQ ID NO: 13226 - RNA, 91 nt, synthetic construct
  source 1..91: mol_type = other RNA
aaataaaaaaaaaaataaatataaaaaaaaaaaaaaaaataaataaatataaataaaaaaaaaaaaaaaaaaaaaaaaaaaaaaaaatata

SEQ ID NO: 13227 - RNA, 91 nt, synthetic construct
  source 1..91: mol_type = other RNA
aaataaaaaaaaaaataaatataaaaaaaaaaaaaaaaataaataaataaatataaaaaaaaaaaaaaaaaaaaaaaaaaaaaaaaatata

SEQ ID NO: 13228 - RNA, 91 nt, synthetic construct
  source 1..91: mol_type = other RNA
aaataaaaaaaaaaataaataaaaaaaaaaaaaaaaatataaataaataaatataaaaaaaaaaaaaaaaaaaaaaaaaaaaaaaaatata

SEQ ID NO: 13229 - RNA, 91 nt, synthetic construct
  source 1..91: mol_type = other RNA
aaataaaaaaaaaaataaataaaaaaaaaaaaaaaaaaataaataaatataaatataaaaaaaaaaaaaaaaaaaaaaaaaaaaaaatata

SEQ ID NO: 13230 - RNA, 91 nt, synthetic construct
  source 1..91: mol_type = other RNA
aatataaataaataaatataaataaataaataaatataaataaataaatataaataaatataaaaaaaaaaaaaaaaaaaaaaaaaatata

SEQ ID NO: 13231 - RNA, 91 nt, synthetic construct
  source 1..91: mol_type = other RNA
aaaaaaaaaatatataaataaaaaaaaataaatataaataaataaaaaaaaaaaaaaaaaaaaaaaaaaaaaaaaaaaaaaaaaaaatata

SEQ ID NO: 13232 - RNA, 91 nt, synthetic construct
  source 1..91: mol_type = other RNA
aatataaataaataaatataaataaataaataaatataaataaataaatataaataaatataaaaaaaaaaaaaaaaaaaaaataaatata

SEQ ID NO: 13233 - RNA, 91 nt, synthetic construct
  source 1..91: mol_type = other RNA
aaaaaaaaaatatataaataaaaaaaaataaatataaataaataaaaaaaaaaaaaaaaaaaaaaaaaaaaaaaaaaaaaaaataaatata

SEQ ID NO: 13234 - RNA, 91 nt, synthetic construct
  source 1..91: mol_type = other RNA
aatataaataaataaatataaataaataaataaatataaataaataaatataaataaatataaataaaaaaaaaaaaaaaaaataaatata

SEQ ID NO: 13235 - RNA, 91 nt, synthetic construct
  source 1..91: mol_type = other RNA
aaaaaataaatatataaataaaaaaaaataaatataaataaataaaaaaaaaaaaaaaaaaaaaaaaaaaaaaaaaaaaaaaataaatata

SEQ ID NO: 13236 - RNA, 91 nt, synthetic construct
  source 1..91: mol_type = other RNA
aaaaaaaaaatatataaataaaaaaaaataaatataaataaataaaaaaaaaaaaaaaaaaaaaaaaaaaaaaaaaaaataaataaatata

SEQ ID NO: 13237 - RNA, 91 nt, synthetic construct
  source 1..91: mol_type = other RNA
aaaaaaaaaaaaaaaaaaaaaaaaaaaaaaaaaaaaaaaaaaaaaaaaaataaatatataaatataaataaataaataaaaaaaaaaaaaa

SEQ ID NO: 13238 - RNA, 91 nt, synthetic construct
  source 1..91: mol_type = other RNA
aaaaaaaaaaaaaaaaaaaaaaaaaaaaaaaaaaaaaaaaataaatataaataaaaataaataaaaaaaaaaaaaaaataaataaatataa

SEQ ID NO: 13239 - RNA, 91 nt, synthetic construct
  source 1..91: mol_type = other RNA
aatataaataaataaatataaataaataaataaatataaataaataaatataaataaatataaataaataaaaaaaaaaaaaataaatata

SEQ ID NO: 13240 - RNA, 91 nt, synthetic construct
  source 1..91: mol_type = other RNA
aaaaaaaaaaaaaaaaaaaaaaaaaaaaaaaaaaaaaaaaataaatataaataaatataaataaaaaaaaaaaaaaaataaataaatatac

SEQ ID NO: 13241 - RNA, 91 nt, synthetic construct
  source 1..91: mol_type = other RNA
aaaaaataaatatataaataaaaaaaaataaatataaataaataaaaaaaaaaaaaaaaaaaaaaaaaaaaaaaaaaaataaataaatata

SEQ ID NO: 13242 - RNA, 91 nt, synthetic construct
  source 1..91: mol_type = other RNA
aaataaaaaaaaaaataaaaaaaaaaaaaaaaaaaaaaataaataaataaatatataaaaaaaaaaaaaaaaaaaaaaaaaaaaaaatata

SEQ ID NO: 13243 - RNA, 91 nt, synthetic construct
  source 1..91: mol_type = other RNA
aaaaaaaaaaaaaataaataaataaaaaaaaaaaaaaaaaaaaaaatataaaaaaaaaaaaaaaaaaaaaaaataaatataaataaataaa

SEQ ID NO: 13244 - RNA, 91 nt, synthetic construct
  source 1..91: mol_type = other RNA
aaaaaaaaaaaaaataaataaataaaaaaaaaaaaaaaaaaaaaaaaataaaaaaaaaaaaaaaaaaaaaatataaatataaataaataaa

SEQ ID NO: 13245 - RNA, 91 nt, synthetic construct
  source 1..91: mol_type = other RNA
aaaaaaaaaaaatataaataaataaaaaaaaaaaaaaaaaaaaaaaaataaaaaaaaaaaaaaaaaaaaaaaataaatataaataaataaa

SEQ ID NO: 13246 - RNA, 91 nt, synthetic construct
  source 1..91: mol_type = other RNA
aaataaaaaaaaaaataaataaaaaaaaaaaaaaaaaaataaataaataaatatataaaaaaaaaaaaaaaaaaaaaaaaaaaaaaatata

SEQ ID NO: 13247 - RNA, 91 nt, synthetic construct
  source 1..91: mol_type = other RNA
aaaaaaaaaaaaaataaataaataaaaaaaaaaaaaaaaaaaaaaaaataaaaaaaaaaaaaaaaaataaatataaatataaataaataaa

SEQ ID NO: 13248 - RNA, 91 nt, synthetic construct
  source 1..91: mol_type = other RNA
aaaaaaaaaaaaaataaataaataaataaaaaaaaaaaaaaaaaaatataaaaaaaaaaaaaaaaaaaaaaaataaatataaataaataaa

SEQ ID NO: 13249 - RNA, 91 nt, synthetic construct
  source 1..91: mol_type = other RNA
aaaaaaaaaaaaaataaataaataaaaaaaaaaaaaaaaaaaaaaatataaataaaaaaaaaaaaaaaaaaaataaatataaataaataaa

SEQ ID NO: 13250 - RNA, 91 nt, synthetic construct
  source 1..91: mol_type = other RNA
aaaaaaaaaaaaaataaataaatataaataaaaaaaaaaaaaaaaaaataaaaaaaaaaaaaaaaaaaaaaaataaatataaataaataaa

SEQ ID NO: 13251 - RNA, 91 nt, synthetic construct
  source 1..91: mol_type = other RNA
aaaaaaaaaaaaaataaataaataaaaaaaaaaaaaaaaaaaaaaaaataaataaaaaaaaaaaaaaaaaatataaatataaataaataaa

SEQ ID NO: 13252 - RNA, 92 nt, synthetic construct
  source 1..92: mol_type = other RNA
aaaaaaaaaaaaaaaaataaataaataaataaaaaaaaaaaaaaaaaaaaaaaaataaataaataaaaaaaaaatataaataaataaatata

SEQ ID NO: 13253 - RNA, 92 nt, synthetic construct
  source 1..92: mol_type = other RNA
aaaaaaaaaaaaaaaaataaataaataaataaaaaaaaaaaaaaaaaaaaaaaaataaataaataaataaaaaatataaataaataaatata

SEQ ID NO: 13254 - RNA, 92 nt, synthetic construct
  source 1..92: mol_type = other RNA
aaaaaaaaaaaaataaataaataaataaataaaaaaaaaaaaaaaaaaaaaaaaataaataaataaaaaaaaaatataaataaataaatata

SEQ ID NO: 13255 - RNA, 92 nt, synthetic construct
  source 1..92: mol_type = other RNA
aaaaaaaaaaaaaaaaataaataaataaataaaaaaaaaaaaaaaaaaaaaaaaataaataaataaaaaataaatataaataaataaatata

SEQ ID NO: 13256 - RNA, 92 nt, synthetic construct
  source 1..92: mol_type = other RNA
aaaaaaaaaaaaataaataaataaataaataaaaaaaaaaaaaaaaaaaaaaaaataaataaataaataaaaaatataaataaataaatata

SEQ ID NO: 13257 - RNA, 92 nt, synthetic construct
  source 1..92: mol_type = other RNA
aaaaaaaaaaaaataaataaataaataaataaaaaaaaaaaaaaaaaaaaaaaaataaataaataaaaaataaatataaataaataaatata

SEQ ID NO: 13258 - RNA, 92 nt, synthetic construct
  source 1..92: mol_type = other RNA
aaaaaaaaaaaaataaataaataaataaataaaaaaaaaaaaaaaaaaaaaaatataaataaataaaaaaaaaatataaataaataaatata

SEQ ID NO: 13259 - RNA, 92 nt, synthetic construct
  source 1..92: mol_type = other RNA
aaaaaaaaaaaaaaaaataaataaataaataaaaaaaaaaaaaaaaaaaaaaatataaataaataaataaaaaatataaataaataaatata

SEQ ID NO: 13260 - RNA, 92 nt, synthetic construct
  source 1..92: mol_type = other RNA
aaaaaaaaaaaaaaaaataaataaataaatataaaaaaaaaaaaaaaaaaaaaaataaataaataaataaaaaatataaataaataaatata

SEQ ID NO: 13261 - RNA, 92 nt, synthetic construct
  source 1..92: mol_type = other RNA
aaaaaaaaaaaaataaataaataaataaatataaaaaaaaaaaaaaaaaaaaaaataaataaataaaaaaaaaatataaataaataaatata

SEQ ID NO: 13262 - RNA, 92 nt, synthetic construct
  source 1..92: mol_type = other RNA
aaaaaaaaaaatataaataaataaataaataaaaaaaaaaaaaaaaaaaaaaaaataaataaataaataaaaaatataaataaataaatata

SEQ ID NO: 13263 - RNA, 92 nt, synthetic construct
  source 1..92: mol_type = other RNA
aaaaaaaaaaaaataaataaataaataaatataaataaaaaaaaaaaaaaaaaaataaataaataaaaaaaaaatataaataaataaatata

SEQ ID NO: 13264 - RNA, 92 nt, synthetic construct
  source 1..92: mol_type = other RNA
aaaaaaaaaaaaataaataaataaataaataaaaaaaaaaaaaaaaaaaaaaatataaataaataaataaaaaatataaataaataaatata

SEQ ID NO: 13265 - RNA, 92 nt, synthetic construct
  source 1..92: mol_type = other RNA
aaaaaaaaaaaaaaaaataaataaataaatataaataaaaaaaaaaaaaaaaaaataaataaataaataaaaaatataaataaataaatata

SEQ ID NO: 13266 - RNA, 92 nt, synthetic construct
  source 1..92: mol_type = other RNA
aaaaaaaaaaaaataaataaataaataaatataaaaaaaaaaaaaaaaaaaaaaataaataaataaataaaaaatataaataaataaatata

SEQ ID NO: 13267 - RNA, 92 nt, synthetic construct
  source 1..92: mol_type = other RNA
aaaaaaaaaaatataaataaataaataaataaaaaaaaaaaaaaaaaaaaaaaaataaataaataaaaaataaatataaataaataaatata

SEQ ID NO: 13268 - RNA, 92 nt, synthetic construct
  source 1..92: mol_type = other RNA
aaaaaaaaaaaaataaataaataaataaataaaaaaaaaaaaaaaaaaaaaaatataaataaataaaaaataaatataaataaataaatata

SEQ ID NO: 13269 - RNA, 92 nt, synthetic construct
  source 1..92: mol_type = other RNA
aaaaaaaaaaaaataaataaataaataaatataaaaaaaaaaaaaaaaaaaaaaataaataaataaaaaataaatataaataaataaatata

SEQ ID NO: 13270 - RNA, 92 nt, synthetic construct
  source 1..92: mol_type = other RNA
aaaaaaaaaaaaataaataaataaataaatataaataaaaaaaaaaaaaaaaaaataaataaataaataaaaaatataaataaataaatata

SEQ ID NO: 13271 - RNA, 92 nt, synthetic construct
  source 1..92: mol_type = other RNA
aaaaaaaaaaaaataaataaataaataaatataaataaaaaaaaaaaaaaaaaaataaataaataaaaaataaatataaataaataaatata

SEQ ID NO: 13272 - RNA, 92 nt, synthetic construct
  source 1..92: mol_type = other RNA
aaaaaaaaaaaaataaataaataaataaataaaaaaaaaaaaaaaaaaataaatataaataaataaataaaaaatataaataaataaatata

SEQ ID NO: 13273 - RNA, 92 nt, synthetic construct
  source 1..92: mol_type = other RNA
aaaaaaaaaaaaataaataaataaataaataaaaaaaaaaaaaaataaataaatataaataaataaataaaaaatataaataaataaatata

SEQ ID NO: 13274 - RNA, 92 nt, synthetic construct
  source 1..92: mol_type = other RNA
aaaaaaaaaaaaataaataaataaataaataaaaaaaaaaaaaaaaaaaaaaaaataaataaataaataaaatatataaataaataaatata

SEQ ID NO: 13275 - RNA, 92 nt, synthetic construct
  source 1..92: mol_type = other RNA
aaaaaaaaaaaaataaataaataaataaatataaataaaaaaaaaaaaaaaaaaataaataaataataaataaatataaataaataaatata

SEQ ID NO: 13276 - RNA, 92 nt, synthetic construct
  source 1..92: mol_type = other RNA
aaaaaaaaaaaaataaataaataaataaatataaataaaaaaaaaaaaaaaaaaataaataaataaataataaatataaataaataaatata

SEQ ID NO: 13277 - RNA, 92 nt, synthetic construct
  source 1..92: mol_type = other RNA
aaaaaaaaaaatataaataaataaataaataaaaaaaaaaaaaaaaaaaaaaatataaataaataaataaaaaatataaataaataaatata

SEQ ID NO: 13278 - RNA, 92 nt, synthetic construct
  source 1..92: mol_type = other RNA
aaaaaaaaaaaaaaaaataaataaataaatataaataaaaaaaaaaaaaaaaatataaataaataaataaaaaatataaataaataaatata

SEQ ID NO: 13279 - RNA, 92 nt, synthetic construct
  source 1..92: mol_type = other RNA
aaaaaaaaaaaaaaatataaataaataaatataaataaaaaaaaaaaaaaaaaaataaataaataaataaaaaatataaataaataaatata

SEQ ID NO: 13280 - RNA, 92 nt, synthetic construct
  source 1..92: mol_type = other RNA
aaaaaaaaaaataaatataaataaataaatataaataaaaaaaaaaaaaaaaaaataaataaataaaaaaaaaatataaataaataaatata

SEQ ID NO: 13281 - RNA, 92 nt, synthetic construct
  source 1..92: mol_type = other RNA
aaaaaaaaaaataaatataaataaataaataaaaaaaaaaaaaaaaaaaaaaatataaataaataaataaaaaatataaataaataaatata

SEQ ID NO: 13282 - RNA, 92 nt, synthetic construct
  source 1..92: mol_type = other RNA
aaaaaaaaaaaaataaataaataaataaatataaataaaaaaaaaaaaaaaaatataaataaataaaaaaaaaatataaataaataaatata

SEQ ID NO: 13283 - RNA, 92 nt, synthetic construct
  source 1..92: mol_type = other RNA
aaaaaaaaaaatataaataaataaataaatataaataaaaaaaaaaaaaaaaaaataaataaataaaaaaaaaatataaataaataaatata

SEQ ID NO: 13284 - RNA, 92 nt, synthetic construct
  source 1..92: mol_type = other RNA
aaaaaaaaaaaaaaaaataaataaataaatataaataaaaaaaaaaaaaaaaatataaataaataaaaaataaatataaataaataaatata

SEQ ID NO: 13285 - RNA, 92 nt, synthetic construct
  source 1..92: mol_type = other RNA
aaaaaaaaaaaaataaataaataaataaatataaaaaaaaaaaaaaaaaaaaatataaataaataaataaaaaatataaataaataaatata

SEQ ID NO: 13286 - RNA, 92 nt, synthetic construct
  source 1..92: mol_type = other RNA
aaaaaaaaaaaaataaataaataaataaatataaataaaaaaaaaaaaaaaaatataaataaataaataaaaaatataaataaataaatata

SEQ ID NO: 13287 - RNA, 92 nt, synthetic construct
  source 1..92: mol_type = other RNA
aaaaaaaaaaatataaataaataaataaatataaataaaaaaaaaaaaaaaaaaataaataaataaataaaaaatataaataaataaatata

SEQ ID NO: 13288 - RNA, 92 nt, synthetic construct
  source 1..92: mol_type = other RNA
aaaaaaaaaaaaaaatataaataaataaataaaaaaaaaaaaaaataaataaatataaataaataaataaaaaatataaataaataaatata

SEQ ID NO: 13289 - RNA, 92 nt, synthetic construct
  source 1..92: mol_type = other RNA
aaaaaaaaaaataaatataaataaataaatataaataaaaaaaaaaaaaaaaaaataaataaataaataaaaaatataaataaataaatata

SEQ ID NO: 13290 - RNA, 92 nt, synthetic construct
  source 1..92: mol_type = other RNA
aaaaaaaaaaaaaaaaataaataaataaataaaaaaaaaaaaatataaataaatataaataaataaataaaaaatataaataaataaatata

SEQ ID NO: 13291 - RNA, 92 nt, synthetic construct
  source 1..92: mol_type = other RNA
aaaaaaaaaaaaataaataaataaataaataaaaaaaaaaaaatataaataaatataaataaataaaaaaaaaatataaataaataaatata

SEQ ID NO: 13292 - RNA, 92 nt, synthetic construct
  source 1..92: mol_type = other RNA
aaaaaaaaaaatataaataaataaataaatataaataaaaaaaaaaaaaaaaaaataaataaataaaaaataaatataaataaataaatata

SEQ ID NO: 13293 - RNA, 92 nt, synthetic construct
  source 1..92: mol_type = other RNA
aaaaaaaaaaaaataaataaataaataaataaaaaaaaaaaaatataaataaatataaataaataaataaaaaatataaataaataaatata

SEQ ID NO: 13294 - RNA, 92 nt, synthetic construct
  source 1..92: mol_type = other RNA
aaaaaaaaaaaaataaataaataaataaatataaataaaaaaaaaaaaataaatataaataaataaataaaaaatataaataaataaatata

SEQ ID NO: 13295 - RNA, 92 nt, synthetic construct
  source 1..92: mol_type = other RNA
aaaaaaaaaaaaataaataaataaataaataaaaaaaaaaaaatataaataaatataaataaataaaaaataaatataaataaataaatata

SEQ ID NO: 13296 - RNA, 92 nt, synthetic construct
  source 1..92: mol_type = other RNA
aaaaaaaaaaatataaataaataaataaataaaaaaaaaaaaaaataaataaatataaataaataaataaaaaatataaataaataaatata

SEQ ID NO: 13297 - RNA, 92 nt, synthetic construct
  source 1..92: mol_type = other RNA
aaaaaaaaaaaaataaataaataaataaatataaataaaaaaaaataaataaatataaataaataaataaaaaatataaataaataaatata

SEQ ID NO: 13298 - RNA, 92 nt, synthetic construct
  source 1..92: mol_type = other RNA
aaaaaaaaaaaaataaataaataaataaatataaataaaaaaaaaaaaaaaaaaataaataaataaataaaatatataaataaataaatata

SEQ ID NO: 13299 - RNA, 92 nt, synthetic construct
  source 1..92: mol_type = other RNA
aaaaaaaaaaaaataaataaataaataaatataaataaaaaaaaaaaaaaaaaaataaataaataaataaaaaatataaataaataaataaa

SEQ ID NO: 13300 - RNA, 92 nt, synthetic construct
  source 1..92: mol_type = other RNA
aaaaaaaaaaaaataaataaataaataaatataaatataaatatataaataaatataaataaataaataaaaaatataaataaataaatata

SEQ ID NO: 13301 - RNA, 92 nt, synthetic construct
  source 1..92: mol_type = other RNA
aaaaaaaaaaaaataaataaataaataaatataaataaaaaaaaaaaaaaaaatataaataaataataaataaatataaataaataaatata

SEQ ID NO: 13302 - RNA, 92 nt, synthetic construct
  source 1..92: mol_type = other RNA
aaaaaaaaaaaaaaaaataaataaataaataaaaaaaaaaaaaaaaaaaaaaaaataaataaataaaaaaaaaatataaaaaaataaatata

SEQ ID NO: 13303 - RNA, 92 nt, synthetic construct
  source 1..92: mol_type = other RNA
aaaaaaaaaaaaaaaaataaataaataaataaaaaaaaaaaaaaaaaaaaaaaaataaataaataaaaaaaaaatataaataaaaaaatata

SEQ ID NO: 13304 - RNA, 92 nt, synthetic construct
  source 1..92: mol_type = other RNA
aaaaaaaaaaaaataaataaataaataaatataaataaaaaaaaaaaaataaatataaataaataataaataaatataaataaataaatata

SEQ ID NO: 13305 - RNA, 92 nt, synthetic construct
  source 1..92: mol_type = other RNA
aaaaaaaaaaaaataaataaataaataaataaaaaaaaaaaaatataaataaatataaataaataaataataaatataaataaataaatata

SEQ ID NO: 13306 - RNA, 92 nt, synthetic construct
  source 1..92: mol_type = other RNA
aaaaaaaaaaaaataaataaataaataaataaaaaaaaaaaaatataaataaatataaataaataataaataaatataaataaataaatata

SEQ ID NO: 13307 - RNA, 92 nt, synthetic construct
  source 1..92: mol_type = other RNA
aaaaaaaaaaaaataaataaataaataaatataaataaaaaaaaaaaaataaatataaataaataaataataaatataaataaataaatata

SEQ ID NO: 13308 - RNA, 92 nt, synthetic construct
  source 1..92: mol_type = other RNA
aaaaaaaaaaaaataaataaataaataaatataaataaaaaaaaataaataaatataaataaataataaataaatataaataaataaatata

SEQ ID NO: 13309 - RNA, 92 nt, synthetic construct
  source 1..92: mol_type = other RNA
aaaaaaaaaataaaaaataaataaataaataaaaaaaaaaaaaaaaaaaaaaaaataaataaataaaaaaaaaatataaataaataaatata

SEQ ID NO: 13310 - RNA, 92 nt, synthetic construct
  source 1..92: mol_type = other RNA
aaaaaaaaaaaaaaaaataaataaataaataaaaataaaaaaaaaaaaaaaaaaataaataaataaaaaaaaaatataaataaataaatata

SEQ ID NO: 13311 - RNA, 92 nt, synthetic construct
  source 1..92: mol_type = other RNA
aaaaataaaaaaaaaaataaataaataaataaaaaaaaaaaaaaaaaaaaaaaaataaataaataaaaaaaaaatataaataaataaatata

SEQ ID NO: 13312 - RNA, 92 nt, synthetic construct
  source 1..92: mol_type = other RNA
aaaaaaaaaaaaaaaaataaataaataaataaaaaaaaaaaaaaaaaaataaaaataaataaataaaaaaaaaatataaataaataaatata

SEQ ID NO: 13313 - RNA, 92 nt, synthetic construct
  source 1..92: mol_type = other RNA
aaaaaaaaaaaataaaataaataaataaataaaaaaaaaaaaaaaaaaaaaaaaataaataaataaaaaaaaaatataaataaataaatata

SEQ ID NO: 13314 - RNA, 92 nt, synthetic construct
  source 1..92: mol_type = other RNA
aaaaaaaaataaaaaaataaataaataaataaaaaaaaaaaaaaaaaaaaaaaaataaataaataaaaaaaaaatataaataaataaatata

SEQ ID NO: 13315 - RNA, 92 nt, synthetic construct
  source 1..92: mol_type = other RNA
aaaaaaaaaaataaaaataaataaataaataaaaaaaaaaaaaaaaaaaaaaaaataaataaataaaaaaaaaatataaataaataaatata

SEQ ID NO: 13316 - RNA, 92 nt, synthetic construct
  source 1..92: mol_type = other RNA
aaaaaaaaaaaaaaaaataaataaataaataaaaaaaaaaaaaaaaaaaataaaataaataaataaaaaaaaaatataaataaataaatata

SEQ ID NO: 13317 - RNA, 92 nt, synthetic construct
  source 1..92: mol_type = other RNA
aaaaaaaaaaaaaaaaataaataaataaataaaaaaaaaaaaataaaaaaaaaaataaataaataaataaaaaatataaataaataaatata

SEQ ID NO: 13318 - RNA, 92 nt, synthetic construct
  source 1..92: mol_type = other RNA
aaaaaaaaaaaaaaaaataaataaataaataaaaataaaaaaaaaaaaaaaaaaataaataaataaataaaaaatataaataaataaatata

SEQ ID NO: 13319 - RNA, 92 nt, synthetic construct
  source 1..92: mol_type = other RNA
aaaaaaaaaaaaataaataaataaataaataaaaataaaaaaaaaaaaaaaaaaataaataaataaaaaaaaaatataaataaataaatata

SEQ ID NO: 13320 - RNA, 92 nt, synthetic construct
  source 1..92: mol_type = other RNA
aaaaaaaaaaaaataaataaataaataaataaaaaaaaaaaaataaaaaaaaaaataaataaataaataaaaaatataaataaataaatata

SEQ ID NO: 13321 - RNA, 92 nt, synthetic construct
  source 1..92: mol_type = other RNA
aaaaaaaaaaaaataaataaataaataaataaaaaataaaaaaaaaaaaaaaaaataaataaataaataaaaaatataaataaataaatata

SEQ ID NO: 13322 - RNA, 92 nt, synthetic construct
  source 1..92: mol_type = other RNA
aaaaaaaaaaaaataaataaataaataaataaaaataaaaaaaaaaaaaaaaaaataaataaataaaaaataaatataaataaataaatata

SEQ ID NO: 13323 - RNA, 92 nt, synthetic construct
  source 1..92: mol_type = other RNA
aaaaaaaaaaaaataaataaataaataaataaaaaaaaaaaaaaataaaaaaaaataaataaataaataaaaaatataaataaataaatata

SEQ ID NO: 13324 - RNA, 92 nt, synthetic construct
  source 1..92: mol_type = other RNA
aaaaaaaaaaaaataaataaataaataaataaaaataaaaaaaaaaaaaaaaaaataaataaataaataaaaaatataaataaataaatata

SEQ ID NO: 13325 - RNA, 92 nt, synthetic construct
  source 1..92: mol_type = other RNA
aaaaaaaaaaaaataaataaataaataaataaaaaaaaaaaaaaaaaaataaaaataaataaataaataaaaaatataaataaataaatata

SEQ ID NO: 13326 - RNA, 92 nt, synthetic construct
  source 1..92: mol_type = other RNA
aaaaaaaaaaaaataaataaataaataaataaaaaaaaaaaaataaataaaaaaataaataaataaataaaaaatataaataaataaatata

SEQ ID NO: 13327 - RNA, 92 nt, synthetic construct
  source 1..92: mol_type = other RNA
aaaaaaaaaaaaaaatataaataaataaatataaataaaaaaaaaaaaaaaaatataaataaataaataaaaaatataaataaataaatata

SEQ ID NO: 13328 - RNA, 92 nt, synthetic construct
  source 1..92: mol_type = other RNA
aaaaaaaaaaatataaataaataaataaatataaataaaaaaaaaaaaaaaaatataaataaataaaaaaaaaatataaataaataaatata

SEQ ID NO: 13329 - RNA, 92 nt, synthetic construct
  source 1..92: mol_type = other RNA
aaaaaaaaaaataaatataaataaataaatataaaaaaaaaaaaaaaaaaaaatataaataaataaataaaaaatataaataaataaatata

SEQ ID NO: 13330 - RNA, 92 nt, synthetic construct
  source 1..92: mol_type = other RNA
aaaaaaaaaaatataaataaataaataaatataaataaaaaaaaaaaaaaaaatataaataaataaataaaaaatataaataaataaatata

SEQ ID NO: 13331 - RNA, 92 nt, synthetic construct
  source 1..92: mol_type = other RNA
aaaaaaaaaaaaaaatataaataaataaataaaaaaaaaaaaatataaataaatataaataaataaataaaaaatataaataaataaatata

SEQ ID NO: 13332 - RNA, 92 nt, synthetic construct
  source 1..92: mol_type = other RNA
aaaaaaaaaaaaaaatataaataaataaatataaataaaaaaaaaaaaataaatataaataaataaataaaaaatataaataaataaatata

SEQ ID NO: 13333 - RNA, 92 nt, synthetic construct
  source 1..92: mol_type = other RNA
aaaaaaaaaaataaatataaataaataaatataaataaaaaaaaaaaaaaaaatataaataaataaataaaaaatataaataaataaatata

SEQ ID NO: 13334 - RNA, 92 nt, synthetic construct
  source 1..92: mol_type = other RNA
aaaaaaaaaaaaaaaaataaataaataaatataaaaaaaaaaatataaataaatataaataaataaataaaaaatataaataaataaatata

SEQ ID NO: 13335 - RNA, 92 nt, synthetic construct
  source 1..92: mol_type = other RNA
aaaaaaaaaaatataaataaataaataaataaaaaaaaaaaaatataaataaatataaataaataaaaaaaaaatataaataaataaatata

SEQ ID NO: 13336 - RNA, 92 nt, synthetic construct
  source 1..92: mol_type = other RNA
aaaaaaaaaaatataaataaataaataaataaaaaaaaaaaaatataaataaatataaataaataaataaaaaatataaataaataaatata

SEQ ID NO: 13337 - RNA, 92 nt, synthetic construct
  source 1..92: mol_type = other RNA
aaaaaaaaaaatataaataaataaataaataaaaaaaaaaaaataaatataaatataaataaataaataaaaaatataaataaataaatata

SEQ ID NO: 13338 - RNA, 92 nt, synthetic construct
  source 1..92: mol_type = other RNA
aaaaaaaaaaatataaataaataaataaataaaaaaaaaaaaatataaataaatataaataaataaaaaataaatataaataaataaatata

SEQ ID NO: 13339 - RNA, 92 nt, synthetic construct
  source 1..92: mol_type = other RNA
aaaaaaaaaaaaataaataaataaataaatataaaaaaaaaaatataaataaatataaataaataaataaaaaatataaataaataaatata

SEQ ID NO: 13340 - RNA, 92 nt, synthetic construct
  source 1..92: mol_type = other RNA
aaaaaaaaaaaaaaatataaataaataaatataaataaaaaaaaataaataaatataaataaataaataaaaaatataaataaataaatata

SEQ ID NO: 13341 - RNA, 92 nt, synthetic construct
  source 1..92: mol_type = other RNA
aaaaaaaaaaataaatataaataaataaataaaaaaaaaaaaatataaataaatataaataaataaataaaaaatataaataaataaatata

SEQ ID NO: 13342 - RNA, 92 nt, synthetic construct
  source 1..92: mol_type = other RNA
aaaaaaaaaaatataaataaataaataaatataaataaaaaaaaaaaaataaatataaataaataaataaaaaatataaataaataaatata

SEQ ID NO: 13343 - RNA, 92 nt, synthetic construct
  source 1..92: mol_type = other RNA
aaaaaaaaaaaaaaaaataaataaataaatataaataaaaaaatataaataaatataaataaataaataaaaaatataaataaataaatata

SEQ ID NO: 13344 - RNA, 92 nt, synthetic construct
  source 1..92: mol_type = other RNA
aaaaaaaaaaataaatataaataaataaatataaataaaaaaaaaaaaataaatataaataaataaataaaaaatataaataaataaatata

SEQ ID NO: 13345 - RNA, 92 nt, synthetic construct
  source 1..92: mol_type = other RNA
aaaaaaaaaaaaataaataaataaataaatataaataaaaaaatataaataaatataaataaataaataaaaaatataaataaataaatata

SEQ ID NO: 13346 - RNA, 92 nt, synthetic construct
  source 1..92: mol_type = other RNA
aaaaaaaaaaatataaataaataaataaatataaataaaaaaaaataaataaatataaataaataaataaaaaatataaataaataaatata

SEQ ID NO: 13347 - RNA, 92 nt, synthetic construct
  source 1..92: mol_type = other RNA
aaaaaaaaaaaaataaataaataaataaatataaatataaaaaaataaataaatataaataaataaataaaaaatataaataaataaatata

SEQ ID NO: 13348 - RNA, 92 nt, synthetic construct
  source 1..92: mol_type = other RNA
aaaaaaaaaaaaataaataaataaataaatataaataaaaaaatataaataaatataaataaataaaaaataaatataaataaataaatata

SEQ ID NO: 13349 - RNA, 92 nt, synthetic construct
  source 1..92: mol_type = other RNA
aaaaaaaaaaatataaataaataaataaatataaataaaaaaaaataaataaatataaataaataaaaaataaatataaataaataaatata

SEQ ID NO: 13350 - RNA, 92 nt, synthetic construct
  source 1..92: mol_type = other RNA
aaaaaaaaaaataaatataaataaataaatataaataaaaaaaaataaataaatataaataaataaataaaaaatataaataaataaatata

SEQ ID NO: 13351 - RNA, 92 nt, synthetic construct
  source 1..92: mol_type = other RNA
aaaaaaaaaaaaatatataaataaataaatataaataaaaaaaaaaaaaaaaaaataaataaataaataaaaaatataaataaataaatata

SEQ ID NO: 13352 - RNA, 93 nt, synthetic construct
  source 1..93: mol_type = other RNA
aaaaaaaaaaaaaaaaaaaaaaaaaaaaaaaaaaaaaaataaataaatataaataaatataaaaaaaaaaaaaaaaaaaaaaaaaaaaaatat

SEQ ID NO: 13353 - RNA, 93 nt, synthetic construct
  source 1..93: mol_type = other RNA
aaaaaaaaaaaaaaaaaaaaaaaaaaaaaaaaaaaaaaataaataaatataaataaatataaataaaaaaaaaaaaaaaaaaaaaaaaaatat

SEQ ID NO: 13354 - RNA, 93 nt, synthetic construct
  source 1..93: mol_type = other RNA
aaaaaaaaaaaaaaaaaaaaaaaaaaaaaaaaaaaaaaataaataaatataaataaatataaataaataaaaaaaaaaaaaaaaaaaaaatat

SEQ ID NO: 13355 - RNA, 93 nt, synthetic construct
  source 1..93: mol_type = other RNA
aaaaaaaaaaaaaaaaaaaaaaaaaaaaaaaaaaaaaaataaataaatataaataaatataaataaataaataaaaaaaaaaaaaaaaaatat

SEQ ID NO: 13356 - RNA, 93 nt, synthetic construct
  source 1..93: mol_type = other RNA
aaaaaaaaaaaaaaaaaaaaaaaaaaaaaaaaaaaaaaataaataaatataaataaatataaataaataaataaataaaaaaaaaaaaaatat

SEQ ID NO: 13357 - RNA, 93 nt, synthetic construct
  source 1..93: mol_type = other RNA
aaaaaaaaaaaataaaaaaaaaaaaaaaaaaaaaaaaaaaaaaaaaaaaaaaaaaaaaaaaaaaaataaaaaaaataaataaataaatatata

SEQ ID NO: 13358 - RNA, 93 nt, synthetic construct
  source 1..93: mol_type = other RNA
aaaaaaaaaaaaaaaaaaaaaaaaaaaaaataaatataaataaaaaaaaaaataaatataaataaaaaaaaaaaaaaaaaaaaaaaaaatata

SEQ ID NO: 13359 - RNA, 93 nt, synthetic construct
  source 1..93: mol_type = other RNA
aaaaaaaaaaaaaaaaaaaaaaaaaaaaaaaaaaaaaaataaataaatataaataaatataaaaaaaaaaaaaaaaaaaaaaaaaaaatatat

SEQ ID NO: 13360 - RNA, 93 nt, synthetic construct
  source 1..93: mol_type = other RNA
aaaaaaaaaaaaaaaaaaaaaaaaaaaaaaaaaaaaaaataaataaatataaataaatatataaaaaaaaaaaaaaaaaaaaaaaaaaaatat

SEQ ID NO: 13361 - RNA, 93 nt, synthetic construct
  source 1..93: mol_type = other RNA
aaaaaaaaaaaataaaaaaaaaaaaaaaaaaaaaaaaaaaaaaaaaaaaaaaaaaaaaaaaaaaaataaaaaaaataaataaataaataaata

SEQ ID NO: 13362 - RNA, 93 nt, synthetic construct
  source 1..93: mol_type = other RNA
aaaaaaaaaaaaaaaaaaaaaaaaaaaaaataaatataaataaaaaaataaataaatataaataaaaaaaaaaaaaaaaaaaaaaaaaatata

SEQ ID NO: 13363 - RNA, 93 nt, synthetic construct
  source 1..93: mol_type = other RNA
aaaaaaaaaaaataaaaaaaaaaaaaaaaaaaaaaaaaaaaaaaaaaaaaaaaaaaaaaaaaaaaataaaaaatataaataaataaatatata

SEQ ID NO: 13364 - RNA, 93 nt, synthetic construct
  source 1..93: mol_type = other RNA
aaaaaaaaaaaaaaaaaaaaaaaaaaaaaaaaaaaaaaataaataaataaaaataaatataaataaaaaaaaaaaaaaaaaaaaaaaaaatat

SEQ ID NO: 13365 - RNA, 93 nt, synthetic construct
  source 1..93: mol_type = other RNA
aaatataaataaatataaatataaaaaaaaaaaaaaaaaaaaaaaaataaataaataaaaaaaaaaaaaaaaaaaaaaaaaaaaaaaaaataa

SEQ ID NO: 13366 - RNA, 93 nt, synthetic construct
  source 1..93: mol_type = other RNA
aaaaaaaataaataaataaaaaaaaaataaatataaataaataaataaataaataaataaaaaaaaaaaaaaaaaaaaaaaaaaaaaaaatat

SEQ ID NO: 13367 - RNA, 93 nt, synthetic construct
  source 1..93: mol_type = other RNA
aaaataaataaataaataaaaaaaaaataaatataaataaataaataaataaataaataaaaaaaaaaaaaaaaaaaaaaaaaaaaaaaatat

SEQ ID NO: 13368 - RNA, 93 nt, synthetic construct
  source 1..93: mol_type = other RNA
aaaaaaaataaataaataaataaaaaataaatataaataaataaataaataaataaataaaaaaaaaaaaaaaaaaaaaaaaaaaaaaaatat

SEQ ID NO: 13369 - RNA, 93 nt, synthetic construct
  source 1..93: mol_type = other RNA
aaaaaaaataaataaataaaaaaaaaataaatataaataaataaataaataaataaataaataaaaaaaaaaaaaaaaaaaaaaaaaaaatat

SEQ ID NO: 13370 - RNA, 93 nt, synthetic construct
  source 1..93: mol_type = other RNA
aaaataaataaataaataaataaaaaataaatataaataaataaataaataaataaataaaaaaaaaaaaaaaaaaaaaaaaaaaaaaaatat

SEQ ID NO: 13371 - RNA, 93 nt, synthetic construct
  source 1..93: mol_type = other RNA
aaaaaaaataaataaataaaaaaaaaataaatataaataaataaataaataaataaataaataaataaaaaaaaaaaaaaaaaaaaaaaatat

SEQ ID NO: 13372 - RNA, 93 nt, synthetic construct
  source 1..93: mol_type = other RNA
aaaataaataaataaataaaaaaaaaataaatataaataaataaataaataaataaataaataaaaaaaaaaaaaaaaaaaaaaaaaaaatat

SEQ ID NO: 13373 - RNA, 93 nt, synthetic construct
  source 1..93: mol_type = other RNA
aaaaaaaataaataaataaataaaaaataaatataaataaataaataaataaataaataaataaaaaaaaaaaaaaaaaaaaaaaaaaaatat

SEQ ID NO: 13374 - RNA, 93 nt, synthetic construct
  source 1..93: mol_type = other RNA
aaataaataaatataaaaaaaaaaataaataaatataaatataaaaaaaaaaaaaaaaaaaaaaaaaaaaaaaataaataaataaataaataa

SEQ ID NO: 13375 - RNA, 93 nt, synthetic construct
  source 1..93: mol_type = other RNA
aaaataaataaataaataaataaaaaataaatataaataaataaataaataaataaataaataaaaaaaaaaaaaaaaaaaaaaaaaaaatat

SEQ ID NO: 13376 - RNA, 93 nt, synthetic construct
  source 1..93: mol_type = other RNA
aaaaaaaataaataaataaaaaaaaaataaatataaataaataaataaataaataaataaataaataaataaaaaaaaaaaaaaaaaaaatat

SEQ ID NO: 13377 - RNA, 93 nt, synthetic construct
  source 1..93: mol_type = other RNA
aaaataaataaataaataaaaaaaaaataaatataaataaataaataaataaataaataaataaataaaaaaaaaaaaaaaaaaaaaaaatat

SEQ ID NO: 13378 - RNA, 93 nt, synthetic construct
  source 1..93: mol_type = other RNA
aaaaaaaataaataaataaataaaaaataaatataaataaataaataaataaataaataaataaataaaaaaaaaaaaaaaaaaaaaaaatat

SEQ ID NO: 13379 - RNA, 93 nt, synthetic construct
  source 1..93: mol_type = other RNA
aaaataaataaataaataaaaaaaaaataaatataaataaataaataaataaataaataaataaataaataaaaaaaaaaaaaaaaaaaatat

SEQ ID NO: 13380 - RNA, 93 nt, synthetic construct
  source 1..93: mol_type = other RNA
aaaataaataaataaataaataaaaaataaatataaataaataaataaataaataaataaataaataaaaaaaaaaaaaaaaaaaaaaaatat

SEQ ID NO: 13381 - RNA, 93 nt, synthetic construct
  source 1..93: mol_type = other RNA
aaaaaaaataaataaataaataaaaaataaatataaataaataaataaataaataaataaataaataaataaaaaaaaaaaaaaaaaaaatat

SEQ ID NO: 13382 - RNA, 93 nt, synthetic construct
  source 1..93: mol_type = other RNA
aaaataaataaataaataaataaaaaataaatataaataaataaataaataaataaataaataaataaataaaaaaaaaaaaaaaaaaaatat

SEQ ID NO: 13383 - RNA, 93 nt, synthetic construct
  source 1..93: mol_type = other RNA
aaaaaaaaaaaaataaaataaataaaaaaaaaaaaaaaaaaaaaaaaaaaaataaataaataaataaataaataaaaaaaaaaaaaaaatata

SEQ ID NO: 13384 - RNA, 93 nt, synthetic construct
  source 1..93: mol_type = other RNA
aaataaataaataaataaaaaaaaaaaaaaaaaaaaaaaaaaaaaaaaaaaaaaaaaaaaataaaaaaaaaaaaaaaaaatataaatatataa

SEQ ID NO: 13385 - RNA, 93 nt, synthetic construct
  source 1..93: mol_type = other RNA
aaatataaataaatataaatataaaaaaaaaaaaaaaaaaaaaaaaataaataaataaaaaaaaaaaaaaaaaaaaaaaaaaaaaaaaaatat

SEQ ID NO: 13386 - RNA, 93 nt, synthetic construct
  source 1..93: mol_type = other RNA
aaaaaaaaaaaatataaaaaaaaaaaaaaaaaaaaaaaaaaaaaaaaaaaaaaaaaaaaaaaaaaataaaaaatataaataaataaatatata

SEQ ID NO: 13387 - RNA, 93 nt, synthetic construct
  source 1..93: mol_type = other RNA
aaaaaaaaaatataaaaaaaaaaaaaaaaaaaaaaaaaaaaaaaaaaaaaaaaaaaaaaaaaaaaataaaaaatataaataaataaatatata

SEQ ID NO: 13388 - RNA, 93 nt, synthetic construct
  source 1..93: mol_type = other RNA
aaaaaaaaaaaaaaaaaaaaaaaaaaaaaaaaaaaaaaataaatatatataaataaatataaataaaaaaaaaaaaaaaaaaaaaaaaaatat

SEQ ID NO: 13389 - RNA, 93 nt, synthetic construct
  source 1..93: mol_type = other RNA
aaaataaataaatataaataaaaaaaaaaaaaaaaaaaaaaaaaaaaaaaaaaaataaataaaaaaaaaaaatataaataaataaataaataa

SEQ ID NO: 13390 - RNA, 93 nt, synthetic construct
  source 1..93: mol_type = other RNA
aaaaaaaaaaaataaaaaaaaaaaaaaaaaaaaaaaaaaaaaaaaaaaaaaaaaaaaaaaaaaaaataaaaaaaatatataaataaatatata

SEQ ID NO: 13391 - RNA, 93 nt, synthetic construct
  source 1..93: mol_type = other RNA
aaaataaataaatataaataaaaaaaaaaaaaaaaaaaaaaaaaaaaaaaataaataaataaaaaaaaaaaatataaataaataaataaataa

SEQ ID NO: 13392 - RNA, 93 nt, synthetic construct
  source 1..93: mol_type = other RNA
aaaataaataaatataaataaaaaaaaaaaaaaaaaaaaaaaaaaaaaaaataaataaataaataaaaaaaatataaataaataaataaataa

SEQ ID NO: 13393 - RNA, 93 nt, synthetic construct
  source 1..93: mol_type = other RNA
aaaataaataaatataaataaataaaaaaaaaaaaaaaaaaaaaaaaaaaataaataaataaaaaaaaaaaatataaataaataaataaataa

SEQ ID NO: 13394 - RNA, 93 nt, synthetic construct
  source 1..93: mol_type = other RNA
aaaataaataaatataaataaaaaaaaaaaaaaaaaaaaaaaaaaaaaaaataaataaataaaaaaaataaatataaataaataaataaataa

SEQ ID NO: 13395 - RNA, 93 nt, synthetic construct
  source 1..93: mol_type = other RNA
aaaataaataaatataaataaaaaaaaaaaaaaaaaaaaaaaaaaaataaataaataaataaaaaaaaaaaatataaataaataaataaataa

SEQ ID NO: 13396 - RNA, 93 nt, synthetic construct
  source 1..93: mol_type = other RNA
aaaataaataaatataaataaataaaaaaaaaaaaaaaaaaaaaaaaaaaataaataaataaaaaaaataaatataaataaataaataaataa

SEQ ID NO: 13397 - RNA, 93 nt, synthetic construct
  source 1..93: mol_type = other RNA
aaaataaataaatataaataaaaaaaaaaaaaaaaaaaaaaaaaaaaaaaataaataaataaataaaataaatataaataaataaataaataa

SEQ ID NO: 13398 - RNA, 93 nt, synthetic construct
  source 1..93: mol_type = other RNA
aaaataaataaatataaataaataaaaaaaaaaaaaaaaaaaaaaaaaaaataaataaataaataaaaaaaatataaataaataaataaataa

SEQ ID NO: 13399 - RNA, 93 nt, synthetic construct
  source 1..93: mol_type = other RNA
aaaataaataaatataaataaaaaaaaaaaaaaaaaaaaaaaaaaaataaataaataaataaataaaaaaaatataaataaataaataaataa

SEQ ID NO: 13400 - RNA, 93 nt, synthetic construct
  source 1..93: mol_type = other RNA
aaaataaataaatataaataaataaataaaaaaaaaaaaaaaaaaaaaaaataaataaataaaaaaaaaaaatataaataaataaataaataa

SEQ ID NO: 13401 - RNA, 93 nt, synthetic construct
  source 1..93: mol_type = other RNA
aaaataaataaatataaataaataaaaaaaaaaaaaaaaaaaaaaaataaataaataaataaaaaaaaaaaatataaataaataaataaataa

SEQ ID NO: 13402 - RNA, 93 nt, synthetic construct
  source 1..93: mol_type = other RNA
aaaataaataaatataaataaataaataaaaaaaaaaaaaaaaaaaaaaaataaataaataaataaaaaaaatataaataaataaataaataa

SEQ ID NO: 13403 - RNA, 93 nt, synthetic construct
  source 1..93: mol_type = other RNA
aaaataaataaatataaataaataaaaaaaaaaaaaaaaaaaaaaaaaaaataaataaataaataaaataaatataaataaataaataaataa

SEQ ID NO: 13404 - RNA, 93 nt, synthetic construct
  source 1..93: mol_type = other RNA
aaaataaataaatataaataaataaataaaaaaaaaaaaaaaaaaaaaaaataaataaataaaaaaaataaatataaataaataaataaataa

SEQ ID NO: 13405 - RNA, 93 nt, synthetic construct
  source 1..93: mol_type = other RNA
aaaataaataaatataaataaataaaaaaaaaaaaaaaaaaaaaaaaaaaataaataaataaataaataaaatataaataaataaataaataa

SEQ ID NO: 13406 - RNA, 93 nt, synthetic construct
  source 1..93: mol_type = other RNA
aaaataaataaatataaataaataaaaaaaaaaaaaaaaaaaaaaaataaataaataaataaataaaaaaaatataaataaataaataaataa

SEQ ID NO: 13407 - RNA, 93 nt, synthetic construct
  source 1..93: mol_type = other RNA
aaaataaataaatataaataaataaataaaaaaaaaaaaaaaaaaaataaataaataaataaaaaaaaaaaatataaataaataaataaataa

SEQ ID NO: 13408 - RNA, 93 nt, synthetic construct
  source 1..93: mol_type = other RNA
aaaataaataaatataaataaaaaaaaaaaaaaaaaaaaaaaaaaaataaataaataaataaataaaataaatataaataaataaataaataa

SEQ ID NO: 13409 - RNA, 93 nt, synthetic construct
  source 1..93: mol_type = other RNA
aaaataaataaatataaataaaaaaaaaaaaaaaaaaaaaaaaaaaataaataaataaataaataaataaaatataaataaataaataaataa

SEQ ID NO: 13410 - RNA, 93 nt, synthetic construct
  source 1..93: mol_type = other RNA
aaaataaataaatataaataaataaaaaaaaaaaaaaaaaaaaaaaataaataaataaataaaaaaaataaatataaataaataaataaataa

SEQ ID NO: 13411 - RNA, 93 nt, synthetic construct
  source 1..93: mol_type = other RNA
aaaaaaaaaaaaaaaaaaaaaaaaaaaaaaaaaaaaaaataaataaatataaaaaaatataaataaaaaaaaaaaaaaaaaaaaaaaaaatat

SEQ ID NO: 13412 - RNA, 93 nt, synthetic construct
  source 1..93: mol_type = other RNA
aaaataaataaatataaataaataaataaaaaaaaaaaaaaaaaaaaaaaataaataaataaataaaataaatataaataaataaataaataa

SEQ ID NO: 13413 - RNA, 93 nt, synthetic construct
  source 1..93: mol_type = other RNA
aaaataaataaatataaataaataaataaaaaaaaaaaaaaaaaaaataaataaataaataaaaaaaataaatataaataaataaataaataa

SEQ ID NO: 13414 - RNA, 93 nt, synthetic construct
  source 1..93: mol_type = other RNA
aaaataaataaatataaataaataaataaaaaaaaaaaaaaaaaaaataaataaataaataaataaaaaaaatataaataaataaataaataa

SEQ ID NO: 13415 - RNA, 93 nt, synthetic construct
  source 1..93: mol_type = other RNA
aaaataaataaatataaataaataaataaaaaaaaaaaaaaaaaaaaaaaataaataaataaataaataaaatataaataaataaataaataa

SEQ ID NO: 13416 - RNA, 93 nt, synthetic construct
  source 1..93: mol_type = other RNA
aaaataaataaatataaataaataaaaaaaaaaaaaaaaaaaaaaaataaataaataaataaataaaataaatataaataaataaataaataa

SEQ ID NO: 13417 - RNA, 93 nt, synthetic construct
  source 1..93: mol_type = other RNA
aaaataaataaatataaataaataaaaaaaaaaaaaaaaaaaaaaaataaataaataaataaataaataaaatataaataaataaataaataa

SEQ ID NO: 13418 - RNA, 93 nt, synthetic construct
  source 1..93: mol_type = other RNA
aaaaaaaaaaaaaaaaaaaaaaaaaaaaaaaaaaaaataaatataaaaaaaaaaaaaaaaaaaaaaaaataaaaaataaataaatataaatat

SEQ ID NO: 13419 - RNA, 93 nt, synthetic construct
  source 1..93: mol_type = other RNA
aaaaaaaaaaaaaaataaaaaaaaaaaaaaaaaaaaaaataaataaatataaataaatataaaaaaaaaaaaaaaaaaaaaaaaaaaaaatat

SEQ ID NO: 13420 - RNA, 93 nt, synthetic construct
  source 1..93: mol_type = other RNA
aaaaaaataaaaaaaaaaaaaaaaaaaaaaaaaaaaaaataaataaatataaataaatataaaaaaaaaaaaaaaaaaaaaaaaaaaaaatat

SEQ ID NO: 13421 - RNA, 93 nt, synthetic construct
  source 1..93: mol_type = other RNA
aaaaaaaaaaaaataaaaaaaaaaaaaaaaaaaaaaaaataaataaatataaataaatataaaaaaaaaaaaaaaaaaaaaaaaaaaaaatat

SEQ ID NO: 13422 - RNA, 93 nt, synthetic construct
  source 1..93: mol_type = other RNA
aaaaaaaaaaaaaaaaaaaaaaaaaaaaaaaaaaaaaaataaataaatataaataaatataaaaaaaaaaaaaaaaataaaaaaaaaaaatat

SEQ ID NO: 13423 - RNA, 93 nt, synthetic construct
  source 1..93: mol_type = other RNA
aaaaaaaaaaaaaaaaaaaaaaaataaaaaaaaaaaaaataaataaatataaataaatataaaaaaaaaaaaaaaaaaaaaaaaaaaaaatat

SEQ ID NO: 13424 - RNA, 93 nt, synthetic construct
  source 1..93: mol_type = other RNA
aaaaaaaaaaaaaaaaaaaaaaaaataaaaaaaaaaaaataaataaatataaataaatataaaaaaaaaaaaaaaaaaaaaaaaaaaaaatat

SEQ ID NO: 13425 - RNA, 93 nt, synthetic construct
  source 1..93: mol_type = other RNA
aaaaaaaaaaaataaaaaaaaaaaaaaaaaaaaaaaaaataaataaatataaataaatataaaaaaaaaaaaaaaaaaaaaaaaaaaaaatat

SEQ ID NO: 13426 - RNA, 93 nt, synthetic construct
  source 1..93: mol_type = other RNA
aaaaaaaaaaaaaaaaaaaaaaaaaaaaaaaaaaaaaaaataaatataaatataaataaataaatataaatataaatataaaaaaaaaaataa

SEQ ID NO: 13427 - RNA, 93 nt, synthetic construct
  source 1..93: mol_type = other RNA
aaaataaataaatataaataaataaataaaaaaaaaaaaaaaaaaaataaataaataaataaataaaataaatataaataaataaataaataa

SEQ ID NO: 13428 - RNA, 93 nt, synthetic construct
  source 1..93: mol_type = other RNA
aaaataaataaatataaataaataaataaaaaaaaaaaaaaaaaaaataaataaataaataaataaataaaatataaataaataaataaataa

SEQ ID NO: 13429 - RNA, 93 nt, synthetic construct
  source 1..93: mol_type = other RNA
aaaaaaaaaaaaataaaaaaaaaaaaaaaaaaaaaaaaataaataaatataaataaatataaataaaaaaaaaaaaaaaaaaaaaaaaaatat

SEQ ID NO: 13430 - RNA, 93 nt, synthetic construct
  source 1..93: mol_type = other RNA
aaaaaaaaaaaaaaataaaaaaaaaaaaaaaaaaaaaaataaataaatataaataaatataaataaaaaaaaaaaaaaaaaaaaaaaaaatat

SEQ ID NO: 13431 - RNA, 93 nt, synthetic construct
  source 1..93: mol_type = other RNA
aaaaaaaaaaaaaaaaaaaaaaaaaaaaaaaaaaaaaaataaataaatataaataaatataaataaaaaaaaaaataaaaaaaaaaaaaatat

SEQ ID NO: 13432 - RNA, 93 nt, synthetic construct
  source 1..93: mol_type = other RNA
aaaaaaaaaaataaaaaaaaaaaaaaaaaaaaaaaaaaataaataaatataaataaatataaataaaaaaaaaaaaaaaaaaaaaaaaaatat

SEQ ID NO: 13433 - RNA, 93 nt, synthetic construct
  source 1..93: mol_type = other RNA
aaaaaaaaaaaaaaaaaaaaaaaaaaaaaaaaaaaaaaataaataaatataaataaatataaataaaaaaaaaaaaaaaaataaaaaaaatat

SEQ ID NO: 13434 - RNA, 93 nt, synthetic construct
  source 1..93: mol_type = other RNA
aaaaaaaaaaaaaaaaaaaaaaaaaaaaaaaaaataaaataaataaatataaataaatataaataaaaaaaaaaaaaaaaaaaaaaaaaatat

SEQ ID NO: 13435 - RNA, 93 nt, synthetic construct
  source 1..93: mol_type = other RNA
aaaaaaaaaaaaaaaaaaaaaaaaaaaaaaaaaaaaaaataaataaatataaataaatataaataaaaaaaaaaaaaaataaaaaaaaaatat

SEQ ID NO: 13436 - RNA, 93 nt, synthetic construct
  source 1..93: mol_type = other RNA
aaaaaaaaaaaaaaaaaaaaaaaaaaaaaaaaataaaaataaataaatataaataaatataaataaaaaaaaaaaaaaaaaaaaaaaaaatat

SEQ ID NO: 13437 - RNA, 93 nt, synthetic construct
  source 1..93: mol_type = other RNA
aaaaaaaaaaaaaaaaaaaaaaaaaaaaaaaaaaaaaaataaataaatataaataaatataaataaaaaaaaaaaaaaaaaaataaaaaatat

SEQ ID NO: 13438 - RNA, 93 nt, synthetic construct
  source 1..93: mol_type = other RNA
aaataaatatataaataaataaataaataaaataaataaataaataaaaaaaaaaaaaaaataaataaataaaaaaaaaaaaaaataaatata

SEQ ID NO: 13439 - RNA, 93 nt, synthetic construct
  source 1..93: mol_type = other RNA
aaaaaaaaaaaaataaaaaaaaaaaaaaaaaaaaaaaaataaataaatataaataaatataaataaataaaaaaaaaaaaaaaaaaaaaatat

SEQ ID NO: 13440 - RNA, 93 nt, synthetic construct
  source 1..93: mol_type = other RNA
aaaaaaaaaaaaaaataaaaaaaaaaaaaaaaaaaaaaataaataaatataaataaatataaataaataaaaaaaaaaaaaaaaaaaaaatat

SEQ ID NO: 13441 - RNA, 93 nt, synthetic construct
  source 1..93: mol_type = other RNA
aaaaaaaaaaataaataaaaaaaaaaaaaaaaaaaaaaataaataaatataaataaatataaataaaaaaaaaaaaaaaaaaaaaaaaaatat

SEQ ID NO: 13442 - RNA, 93 nt, synthetic construct
  source 1..93: mol_type = other RNA
aaaaaaaaataaataaaaaaaaaaaaaaaaaaaaaaaaataaataaatataaataaatataaataaaaaaaaaaaaaaaaaaaaaaaaaatat

SEQ ID NO: 13443 - RNA, 93 nt, synthetic construct
  source 1..93: mol_type = other RNA
aaaaaaaaaaaaaaaaaaaaaaaaaaaaaaaaaaaaaaataaataaatataaataaatataaataaataaaaaaataaaaaaaaaaaaaatat

SEQ ID NO: 13444 - RNA, 93 nt, synthetic construct
  source 1..93: mol_type = other RNA
aaaaaaaaaaaaaaaaaaaaaaaaaaaaaaaaaaaaaaataaataaatataaataaatataaataaaaaaataaataaaaaaaaaaaaaatat

SEQ ID NO: 13445 - RNA, 93 nt, synthetic construct
  source 1..93: mol_type = other RNA
aaaaaaaaaaaaaaaaaaaaaaaaaaaaaaaaaaaaaaataaataaatataaataaatataaataaataaaaaaaaaaaaataaaaaaaatat

SEQ ID NO: 13446 - RNA, 93 nt, synthetic construct
  source 1..93: mol_type = other RNA
aaaaaaaaataaataaaaaaaaaaaaaaaaaaaaaaaaataaataaatataaataaatataaataaataaaaaaaaaaaaaaaaaaaaaatat

SEQ ID NO: 13447 - RNA, 93 nt, synthetic construct
  source 1..93: mol_type = other RNA
aaaaaaaaaaataaataaaaaaaaaaaaaaaaaaaaaaataaataaatataaataaatataaataaataaaaaaaaaaaaaaaaaaaaaatat

SEQ ID NO: 13448 - RNA, 93 nt, synthetic construct
  source 1..93: mol_type = other RNA
aaaaaaaaaaaaaaataaaaaaaaaaaaaaaaaaaaaaataaataaatataaataaatataaataaataaataaaaaaaaaaaaaaaaaatat

SEQ ID NO: 13449 - RNA, 93 nt, synthetic construct
  source 1..93: mol_type = other RNA
aaaaaaaaaaaaataaaaaaaaaaaaaaaaaaaaaaaaataaataaatataaataaatataaataaataaataaaaaaaaaaaaaaaaaatat

SEQ ID NO: 13450 - RNA, 93 nt, synthetic construct
  source 1..93: mol_type = other RNA
aaaaaaaaaaaaataaaaaaaaaaaaaaaaaaaaaaaaataaataaatataaataaatataaataaataaataaataaaaaaaaaaaaaatat

SEQ ID NO: 13451 - RNA, 93 nt, synthetic construct
  source 1..93: mol_type = other RNA
aaaaaaaaaaaaaaataaaaaaaaaaaaaaaaaaaaaaataaataaatataaataaatataaataaataaataaataaaaaaaaaaaaaatat

SEQ ID NO: 13452 - RNA, 93 nt, synthetic construct
  source 1..93: mol_type = other RNA
aaaaaaaaaaataaataaataaaaaaaaaaaaaaaaaaataaataaatataaataaatataaataaataaaaaaaaaaaaaaaaaaaaaatat

SEQ ID NO: 13453 - RNA, 93 nt, synthetic construct
  source 1..93: mol_type = other RNA
aaaaaaaaataaataaaaaaaaaaaaaaaaaaaaaaaaataaataaatataaataaatataaataaataaataaaaaaaaaaaaaaaaaatat

SEQ ID NO: 13454 - RNA, 93 nt, synthetic construct
  source 1..93: mol_type = other RNA
aaaaaaaaaaataaaaaaaaaaaaaaaaaaaaaaaaaaataaataaatataaataaatataaataaataaataaataaaaaaaaaaaaaatat

SEQ ID NO: 13455 - RNA, 93 nt, synthetic construct
  source 1..93: mol_type = other RNA
aaaaaaaaaaataaataaaaaaaaaaaaaaaaaaaaaaataaataaatataaataaatataaataaataaataaaaaaaaaaaaaaaaaatat

SEQ ID NO: 13456 - RNA, 94 nt, synthetic construct
  source 1..94: mol_type = other RNA
aaaataaataaaaaaaaaaaaaaatataaaaaaaaaaaaaaaaaaaaaaaaaaaaaaaaaaaaaaaaaataaataaatataaataaataaataa

SEQ ID NO: 13457 - RNA, 94 nt, synthetic construct
  source 1..94: mol_type = other RNA
aaaataaataaaaaaaaaaaaaaatataaataaaaaaaaaaaaaaaaaaaaaaaaaaaaaaaaaaaaaataaataaatataaataaataaataa

SEQ ID NO: 13458 - RNA, 94 nt, synthetic construct
  source 1..94: mol_type = other RNA
aaaaaaaaaaaaaaaaaaaaaaaaaaaaaaaaaaaaaaaataaataaaaaaaaaaaaaaaaaaaaaaaaaaaaaaataaaaaataaatatataa

SEQ ID NO: 13459 - RNA, 94 nt, synthetic construct
  source 1..94: mol_type = other RNA
aaataaataaaaaaaaaaaataaaaaaaaataaaaaaaaaaaaaaaaaaaaatataaataaataaataaataaataaataaataaataaataaa

SEQ ID NO: 13460 - RNA, 94 nt, synthetic construct
  source 1..94: mol_type = other RNA
aaataaatataaataaataaataaaaaaaaaaaaaaaaaataaaaaaaaaaaaaaaaaatataaatataaaaaaaaaaaaaaaaaaaaaatata

SEQ ID NO: 13461 - RNA, 94 nt, synthetic construct
  source 1..94: mol_type = other RNA
aaataaatataaataaataaataaaaaaaaaaaaaaaaaataaaaaaaaaaaaaaaaaatataaatataaataaaaaaaaaaaaaaaaaatata

SEQ ID NO: 13462 - RNA, 94 nt, synthetic construct
  source 1..94: mol_type = other RNA
aaataaatataaataaataaataaaaaaaaaaaaaaaaaataaataaaaaaaaaaaaaatataaatataaataaaaaaaaaaaaaaaaaatata

SEQ ID NO: 13463 - RNA, 94 nt, synthetic construct
  source 1..94: mol_type = other RNA
aaaataaataaaaaaaaaaaaaaatataaaaaaaaaaaaaaaaaaaaaaaaaaaaaaaaaaaaaaaatataaataaatataaataaataaataa

SEQ ID NO: 13464 - RNA, 94 nt, synthetic construct
  source 1..94: mol_type = other RNA
aaaaaataaaaaaaaaaaaaaaataaaaaaaaaaaaaaaaaaaaaaaaaaaaaaaaaaaataaataaataaataaaaaaaaaaaaaaaaaaata

SEQ ID NO: 13465 - RNA, 94 nt, synthetic construct
  source 1..94: mol_type = other RNA
aaaaaaaaaaaaaaaaaataaataaataaataaaaaaaaaaaaaaaatataaaaaaaaaataaataaaaaaaaaaaaaaaaaaataaatatata

SEQ ID NO: 13466 - RNA, 94 nt, synthetic construct
  source 1..94: mol_type = other RNA
aaaaaaaaaaaaaaaaaataaataaataaataaaaaaaaaaaaaaaatataaaaaataaataaataaaaaaaaaaaaaaaaaaataaatatata

SEQ ID NO: 13467 - RNA, 94 nt, synthetic construct
  source 1..94: mol_type = other RNA
aaaaaaaaaaaaaaaaaataaataaataaataaaaaaaaaaaaaaaatataaaaaataaataaataaaaaaaaaaaaaaataaataaatatata

SEQ ID NO: 13468 - RNA, 94 nt, synthetic construct
  source 1..94: mol_type = other RNA
aaaaaaaaaaaaaaaaaaaaaaaaaaaaaaaaaaaaaaaataaataaaaaaaaaaaaaaaaaaaaaaaaaaaaaaataaaaaataaatatatac

SEQ ID NO: 13469 - RNA, 94 nt, synthetic construct
  source 1..94: mol_type = other RNA
aaaatatataaaaaaaaaaaaaaatataaaaaaaaaaaaaaaaaaaaaaaaaaaaaaaaaaaaaaaaaataaataaatataaataaataaataa

SEQ ID NO: 13470 - RNA, 94 nt, synthetic construct
  source 1..94: mol_type = other RNA
aaaataaataaaaaaaaaaaaaaatataaaaaaaaaaaaaaaaaaaaaaaaaaaaaaaaaaaaaaaaaataaataaatataaataaatatataa

SEQ ID NO: 13471 - RNA, 94 nt, synthetic construct
  source 1..94: mol_type = other RNA
aaataaatataaataaataaataaaaaaaaaaaaaaaaaataaaaaaaaaaaaaaaaaatataaatataaataaaaaaaaaaaaaaaaaataaa

SEQ ID NO: 13472 - RNA, 94 nt, synthetic construct
  source 1..94: mol_type = other RNA
aaataaatataaataaataaataaaaaaaaaaaaaaaaaataaaaaaaaaaaaaaaaaatataaatataaataaataaaaaaaaaaaaaataaa

SEQ ID NO: 13473 - RNA, 94 nt, synthetic construct
  source 1..94: mol_type = other RNA
aaataaatataaataaataaataaaaaaaaaaaaaaaaaataaaaaaaaaaaaaaaaaatataaatataaataaaaaaaaaaaaaataaataaa

SEQ ID NO: 13474 - RNA, 94 nt, synthetic construct
  source 1..94: mol_type = other RNA
aaataaatataaataaataaataaaaaaaaaaaaaaaaaataaaaaaaaaaaaaataaatataaatataaataaaaaaaaaaaaaaaaaataaa

SEQ ID NO: 13475 - RNA, 94 nt, synthetic construct
  source 1..94: mol_type = other RNA
aaataaatataaataaataaataaaaaaaaaaaaaaaaaataaataaaaaaaaaaaaaatataaatataaataaaaaaaaaaaaaaaaaataaa

SEQ ID NO: 13476 - RNA, 94 nt, synthetic construct
  source 1..94: mol_type = other RNA
aaataaatataaataaataaataaaaaaaaaaaaaaaaaataaaaaaaaaaaaaaaaaatataaatataaataaataaaaaaaaaataaataaa

SEQ ID NO: 13477 - RNA, 94 nt, synthetic construct
  source 1..94: mol_type = other RNA
aaataaatataaataaataaataaaaaaaaaaaaaaaaaataaaaaaaaaaaaaataaatataaatataaataaaaaaaaaaaaaataaataaa

SEQ ID NO: 13478 - RNA, 94 nt, synthetic construct
  source 1..94: mol_type = other RNA
aaataaatataaataaataaataaaaaaaaaaaaaaaaaataaataaaaaaaaaaaaaatataaatataaataaaaaaaaaaaaaataaataaa

SEQ ID NO: 13479 - RNA, 94 nt, synthetic construct
  source 1..94: mol_type = other RNA
aaataaatataaataaataaataaaaaaaaaaaaaaaaaataaaaaaaaaaaaaataaatataaatataaataaataaaaaaaaaataaataaa

SEQ ID NO: 13480 - RNA, 94 nt, synthetic construct
  source 1..94: mol_type = other RNA
aaataaatataaataaataaataaaaaaaaaaaaaaaaaataaataaaaaaaaaaaaaatataaatataaataaataaaaaaaaaataaataaa

SEQ ID NO: 13481 - RNA, 94 nt, synthetic construct
  source 1..94: mol_type = other RNA
aaaaaaaaaaaaaaaaaaaaaaaaaaaaataaaataaataaataaataaataaataaataaatatataaatataaaaaaaaaaaaaaatataaa

SEQ ID NO: 13482 - RNA, 94 nt, synthetic construct
  source 1..94: mol_type = other RNA
aaaaaaaaaaaaaaaaaaaaaaaaaaaaataaaataaataaataaataaataaataaataaatatataaatataaataaaaaaaaaaatataaa

SEQ ID NO: 13483 - RNA, 94 nt, synthetic construct
  source 1..94: mol_type = other RNA
aaaaaataaaaaaaaaaaaaaaatataaaaaaaaaaaaaaaaaaaaaaaaaaaaaaaaaataaataaataaataaaaaaaaaaaaaaaaaaata

SEQ ID NO: 13484 - RNA, 94 nt, synthetic construct
  source 1..94: mol_type = other RNA
aaaaaataaaaaaaaaaaaaaaataaaaaaaaaaaaaaaaaaaaaaaaaaaaaaaaaatataaataaataaataaaaaaaaaaaaaaaaaaata

SEQ ID NO: 13485 - RNA, 94 nt, synthetic construct
  source 1..94: mol_type = other RNA
aaaaaaaaaaaaaaaaaataaataaataaataaaaaaaaaaaaaaaatataaaaaataaataaataaaaaaaaaaaaaaaaaaataaataaata

SEQ ID NO: 13486 - RNA, 94 nt, synthetic construct
  source 1..94: mol_type = other RNA
aaataaataaaaaaaaaaaataaaaaaaaataaaaaaaaaaaaaaaaaaaaatataaataaataaatatataaataaataaataaataaataaa

SEQ ID NO: 13487 - RNA, 94 nt, synthetic construct
  source 1..94: mol_type = other RNA
aaataaataaaaaaaaaaaataaaaaaaaataaaaaaaaaaaaaaaaaaaaatataaataaataaataaataaataaataaatatataaataaa

SEQ ID NO: 13488 - RNA, 94 nt, synthetic construct
  source 1..94: mol_type = other RNA
aaaaaaaaaaaaaaaaaaaaaaaaaaaaataaaaaaaaaaaaaaaaaaataaatataaataaaaaaaaaaatataaaaaaaaaaaaataaataa

SEQ ID NO: 13489 - RNA, 94 nt, synthetic construct
  source 1..94: mol_type = other RNA
aaaatataaataaaaaataaatataaataaatataaaaaaaaaaaaaaaaaaaaaaaaaaaaaaaaaaaaaaaaaaaatataaataaataaata

SEQ ID NO: 13490 - RNA, 94 nt, synthetic construct
  source 1..94: mol_type = other RNA
aaaaaaaaaaaaaaaaaataaataaataaataaaaaaaaaaaaaaaatataaaaaataaataaataaaaaaaaaaaaaaaaatataaatatata

SEQ ID NO: 13491 - RNA, 94 nt, synthetic construct
  source 1..94: mol_type = other RNA
aaaaaaaaaaaaaaaaaataaataaataaatataaaaaaaaaaaaaatataaaaaataaataaataaaaaaaaaaaaaaaaaaataaatatata

SEQ ID NO: 13492 - RNA, 94 nt, synthetic construct
  source 1..94: mol_type = other RNA
aaaataaataaaaaaaaaaaaaaatataaaaaaaaataaaaaaaaaaaaaaaaaaaaaaaaaaaaaaaataaataaatataaataaataaataa

SEQ ID NO: 13493 - RNA, 94 nt, synthetic construct
  source 1..94: mol_type = other RNA
aaaataaataaaaaaaaaaaaaaatataaaaaaaaaaaaaaaaaaaaataaaaaaaaaaaaaaaaaaaataaataaatataaataaataaataa

SEQ ID NO: 13494 - RNA, 94 nt, synthetic construct
  source 1..94: mol_type = other RNA
aaaataaataaaaaaaaaaaaaaatataaaaaaaaaaaaaaaaaaaaaaaaaataaaaaaaaaaaaaaataaataaatataaataaataaataa

SEQ ID NO: 13495 - RNA, 94 nt, synthetic construct
  source 1..94: mol_type = other RNA
aaaataaataaaaaaaaaaaaaaatataaaaaaaaaaaaaaaaaaaaaaaaaaaaaaaataaaaaaaaataaataaatataaataaataaataa

SEQ ID NO: 13496 - RNA, 94 nt, synthetic construct
  source 1..94: mol_type = other RNA
aaaataaataaaaaaaaaaaaaaatataaataaaaaaaaaaaaaaaataaaaaaaaaaaaaaaaaaaaataaataaatataaataaataaataa

SEQ ID NO: 13497 - RNA, 94 nt, synthetic construct
  source 1..94: mol_type = other RNA
aaaaaaaaaaaaaaaaaaaaaaaaaaaaataaaaaaaaaataaaaaaaaaaaaaaaaaaaaaaaaaaaaaaataaataaaaaataaatatataa

SEQ ID NO: 13498 - RNA, 94 nt, synthetic construct
  source 1..94: mol_type = other RNA
aaaaaaaaaaaaaaaaaaaaaaaaaaaaataaaaaaaaaataaataaaaaaaaaaaaaaaaaaaaaaaaaaaaaaataaaaaataaatatataa

SEQ ID NO: 13499 - RNA, 94 nt, synthetic construct
  source 1..94: mol_type = other RNA
aaaaaaaaaaaaaaaaaaaaaaaaaaaaaaaataaaaaaataaataaaaaaaaaaaaaaaaaaaaaaaaaaaaaaataaaaaataaatatataa

SEQ ID NO: 13500 - RNA, 94 nt, synthetic construct
  source 1..94: mol_type = other RNA
aaaaaaaaaaaaaaaaaaaaaaaaaaaaataaaaaaaaaataaataaaaaaaaaaaaaaaaaaaaaaaaaaataaataaaaaataaatatataa

SEQ ID NO: 13501 - RNA, 94 nt, synthetic construct
  source 1..94: mol_type = other RNA
aaaaaaaaaaaaaaaaaaaaaaaaaaaaataaaaaaaaaataaataaataaaaaaaaaaaaaaaaaaaaaaataaataaaaaataaatatataa

SEQ ID NO: 13502 - RNA, 94 nt, synthetic construct
  source 1..94: mol_type = other RNA
aaaaaaaaaaaaaaaaaaaaaaaaaaaaataaaaaaaaaataaataaaaaaaaaaaaaaaaaaaaaaataaataaataaaaaataaatatataa

SEQ ID NO: 13503 - RNA, 94 nt, synthetic construct
  source 1..94: mol_type = other RNA
aaaaaaaaaaaaaaaaaataaataaataaataaaaaaaaaaaaaaaatatataaaataaataaataaaaaaaaaaaaaaaaaaataaatatata

SEQ ID NO: 13504 - RNA, 94 nt, synthetic construct
  source 1..94: mol_type = other RNA
aaaaaaaaaaaaaaaaaaaaaaaaaaaaataaaaaaaaaataaataaataaaaaaaaaaaaaaaaaaataaataaataaaaaataaatatataa

SEQ ID NO: 13505 - RNA, 94 nt, synthetic construct
  source 1..94: mol_type = other RNA
aaaaaaaaaataaatatataaataaaaaaaaaataaataaataaataaataaataaataaaaaataaataaaaaaaaaaaaaaaaaaaaaataa

SEQ ID NO: 13506 - RNA, 94 nt, synthetic construct
  source 1..94: mol_type = other RNA
aaataaataaaaaaaaaaaataaaaaaaaataaaaaaaaaaaaaaaataaaatataaataaataaataaataaataaataaataaataaataaa

SEQ ID NO: 13507 - RNA, 94 nt, synthetic construct
  source 1..94: mol_type = other RNA
aaataaataaaaaaaaaaaataaaaaaaaataaaaaaaaaaaaaataaaaaatataaataaataaataaataaataaataaataaataaataaa

SEQ ID NO: 13508 - RNA, 94 nt, synthetic construct
  source 1..94: mol_type = other RNA
aaaaaaaaaataaatatataaataaaaaaaaaataaataaataaataaataaataaataaaaaataaataaataaaaaaaaaaaaaaaaaataa

SEQ ID NO: 13509 - RNA, 94 nt, synthetic construct
  source 1..94: mol_type = other RNA
aaaaaaaaaataaatatataaataaaaaataaataaataaataaataaataaataaataaaaaataaataaaaaaaaaaaaaaaaaaaaaataa

SEQ ID NO: 13510 - RNA, 94 nt, synthetic construct
  source 1..94: mol_type = other RNA
aaaaaaaaaataaatatataaataaaaaataaataaataaataaataaataaataaataaaaaataaataaataaaaaaaaaaaaaaaaaataa

SEQ ID NO: 13511 - RNA, 94 nt, synthetic construct
  source 1..94: mol_type = other RNA
aaaataaataaaaaaaaaaaaaaatataaaaaaaaaaaaaaaaaaaaaaaaaaaaaaaaaaaaaaaaaataaataaatataaataaataaatac

SEQ ID NO: 13512 - RNA, 94 nt, synthetic construct
  source 1..94: mol_type = other RNA
aaataaatataaataaataaatataaaaaaaaaaaaaaaataaaaaaaaaaaaaaaaaatataaatataaataaaaaaaaaaaaaaaaaataaa

SEQ ID NO: 13513 - RNA, 94 nt, synthetic construct
  source 1..94: mol_type = other RNA
aaaataaataaaaaaaaaaaaaaatataaataaaaaaaaaaaaaaaaaaaaaaaaaaaaaaaaaaaaaataaataaatataaataaataaatac

SEQ ID NO: 13514 - RNA, 94 nt, synthetic construct
  source 1..94: mol_type = other RNA
aaataaatataaataaataaatataaaaaaaaaaaaaaaataaaaaaaaaaaaaaaaaatataaatataaataaaaaaaaaaaaaataaataaa

SEQ ID NO: 13515 - RNA, 94 nt, synthetic construct
  source 1..94: mol_type = other RNA
aaataaatataaataaataaatataaaaaaaaaaaaaaaataaaaaaaaaaaaaaaaaatataaatataaataaataaaaaaaaaaaaaataaa

SEQ ID NO: 13516 - RNA, 94 nt, synthetic construct
  source 1..94: mol_type = other RNA
aaataaatataaataaataaatataaaaaaaaaaaaaaaataaaaaaaaaaaaaataaatataaatataaataaaaaaaaaaaaaaaaaataaa

SEQ ID NO: 13517 - RNA, 94 nt, synthetic construct
  source 1..94: mol_type = other RNA
aaataaatataaataaataaatataaaaaaaaaaaaaaaataaataaaaaaaaaaaaaatataaatataaataaaaaaaaaaaaaaaaaataaa

SEQ ID NO: 13518 - RNA, 94 nt, synthetic construct
  source 1..94: mol_type = other RNA
aaataaatataaataaataaataaaaaaaaaaaaaaaatataaaaaaaaaaaaaaaaaatataaatataaataaaaaaaaaaaaaataaataaa

SEQ ID NO: 13519 - RNA, 94 nt, synthetic construct
  source 1..94: mol_type = other RNA
aaaaaaaaaataaataaatataaataaaaaaaaaaaaaataaaataaataaataaaaaaaaaaaaaaataaaaaaaaaaaaaaaaaaaaatata

SEQ ID NO: 13520 - RNA, 94 nt, synthetic construct
  source 1..94: mol_type = other RNA
aaataaatataaataaataaatataaaaaaaaaaaaaaaataaaaaaaaaaaaaaaaaatataaatataaataaataaaaaaaaaataaataaa

SEQ ID NO: 13521 - RNA, 94 nt, synthetic construct
  source 1..94: mol_type = other RNA
aaataaatataaataaataaatataaaaaaaaaaaaaaaataaaaaaaaaaaaaataaatataaatataaataaataaaaaaaaaaaaaataaa

SEQ ID NO: 13522 - RNA, 94 nt, synthetic construct
  source 1..94: mol_type = other RNA
aaataaatataaataaataaatataaaaaaaaaaaaaaaataaataaaaaaaaaaaaaatataaatataaataaaaaaaaaaaaaataaataaa

SEQ ID NO: 13523 - RNA, 94 nt, synthetic construct
  source 1..94: mol_type = other RNA
aaataaatataaataaataaatataaaaaaaaaaaaaaaataaaaaaaaaaaaaataaatataaatataaataaaaaaaaaaaaaataaataaa

SEQ ID NO: 13524 - RNA, 94 nt, synthetic construct
  source 1..94: mol_type = other RNA
aaataaatataaataaataaatataaaaaaaaaaaaaaaataaataaaaaaaaaaaaaatataaatataaataaataaaaaaaaaaaaaataaa

SEQ ID NO: 13525 - RNA, 94 nt, synthetic construct
  source 1..94: mol_type = other RNA
aaataaatataaataaataaatataaaaaaaaaaaaaaaataaaaaaaaaataaataaatataaatataaataaaaaaaaaaaaaaaaaataaa

SEQ ID NO: 13526 - RNA, 94 nt, synthetic construct
  source 1..94: mol_type = other RNA
aaataaatataaataaataaatataaaaaaaaaaaaaaaataaataaaaaaaaaataaatataaatataaataaaaaaaaaaaaaaaaaataaa

SEQ ID NO: 13527 - RNA, 94 nt, synthetic construct
  source 1..94: mol_type = other RNA
aaataaatataaataaataaataaaaaaaaaaaaaaaatataaataaaaaaaaaaaaaatataaatataaataaaaaaaaaaaaaataaataaa

SEQ ID NO: 13528 - RNA, 94 nt, synthetic construct
  source 1..94: mol_type = other RNA
aaatatatataaataaataaataaaaaaaaaaaaaaaaaataaaaaaaaaaaaaaaaaatataaatataaaaaaaaaaaaaaaaaaaaaatata

SEQ ID NO: 13529 - RNA, 94 nt, synthetic construct
  source 1..94: mol_type = other RNA
aaataaatataaataaataaatataaaaaaaaaaaaaaaataaataaaaaaaaaataaatataaatataaataaaaaaaaaaaaaataaataaa

SEQ ID NO: 13530 - RNA, 94 nt, synthetic construct
  source 1..94: mol_type = other RNA
aaataaatataaataaataaatataaaaaaaaaaaaaaaataaaaaaaaaaaaaataaatataaatataaataaataaaaaaaaaataaataaa

SEQ ID NO: 13531 - RNA, 94 nt, synthetic construct
  source 1..94: mol_type = other RNA
aaataaatataaataaataaatataaaaaaaaaaaaaaaataaataaaaaaaaaaaaaatataaatataaataaataaaaaaaaaataaataaa

SEQ ID NO: 13532 - RNA, 94 nt, synthetic construct
  source 1..94: mol_type = other RNA
aaataaatataaataaataaatataaaaaaaaaaaaaaaataaaaaaaaaataaataaatataaatataaataaaaaaaaaaaaaataaataaa

SEQ ID NO: 13533 - RNA, 94 nt, synthetic construct
  source 1..94: mol_type = other RNA
aaataaatataaataaataaatataaaaaaaaaaaaaaaataaaaaaaaaataaataaatataaatataaataaataaaaaaaaaaaaaataaa

SEQ ID NO: 13534 - RNA, 94 nt, synthetic construct
  source 1..94: mol_type = other RNA
aaataaatataaataaataaataaaaaaaaaaaaaaaatataaataaaaaaaaaataaatataaatataaataaaaaaaaaaaaaataaataaa

SEQ ID NO: 13535 - RNA, 94 nt, synthetic construct
  source 1..94: mol_type = other RNA
aaataaatataaataaataaatataaaaaaaaaaaaaaaataaataaaaaataaataaatataaatataaataaaaaaaaaaaaaaaaaataaa

SEQ ID NO: 13536 - RNA, 94 nt, synthetic construct
  source 1..94: mol_type = other RNA
aaataaatataaataaataaataaaaaaaaaaaaaaaatataaaaaaaaaataaataaatataaatataaataaaaaaaaaaaaaataaataaa

SEQ ID NO: 13537 - RNA, 94 nt, synthetic construct
  source 1..94: mol_type = other RNA
aaataaatataaataaataaataaaaaaaaaaaaaaaatataaataaaaaaaaaaaaaatataaatataaataaataaaaaaaaaataaataaa

SEQ ID NO: 13538 - RNA, 94 nt, synthetic construct
  source 1..94: mol_type = other RNA
aaataaatataaataaataaatataaaaaaaaaaaaaaaataaataaaaaaaaaataaatataaatataaataaataaaaaaaaaaaaaataaa

SEQ ID NO: 13539 - RNA, 94 nt, synthetic construct
  source 1..94: mol_type = other RNA
aaataaatataaataaataaatataaaaaaaaaaaaaaaataaaaaaaaaataaataaatataaatataaataaataaaaaaaaaataaataaa

SEQ ID NO: 13540 - RNA, 94 nt, synthetic construct
  source 1..94: mol_type = other RNA
aaataaatataaataaataaatataaaaaaaaaaaaaaaataaataaaaaaaaaataaatataaatataaataaataaaaaaaaaataaataaa

SEQ ID NO: 13541 - RNA, 94 nt, synthetic construct
  source 1..94: mol_type = other RNA
aaataaatataaataaataaatataaaaaaaaaaaaaaaataaataaaaaataaataaatataaatataaataaaaaaaaaaaaaataaataaa

SEQ ID NO: 13542 - RNA, 94 nt, synthetic construct
  source 1..94: mol_type = other RNA
aaataaatataaataaataaataaaaaaaaaaaaaaaatataaataaaaaataaataaatataaatataaataaaaaaaaaaaaaataaataaa

SEQ ID NO: 13543 - RNA, 94 nt, synthetic construct
  source 1..94: mol_type = other RNA
aaataaatataaataaataaatataaaaaaaaaaaaaaaataaataaaaaataaataaatataaatataaataaataaaaaaaaaaaaaataaa

SEQ ID NO: 13544 - RNA, 94 nt, synthetic construct
  source 1..94: mol_type = other RNA
aaataaatataaataaataaataaaaaaaaaaaaaaaatataaataaaaaataaataaatataaatataaataaataaaaaaaaaataaataaa

SEQ ID NO: 13545 - RNA, 94 nt, synthetic construct
  source 1..94: mol_type = other RNA
aaataaatataaataaataaatataaaaaaaaaaaaaaaataaataaaaaataaataaatataaatataaataaataaaaaaaaaataaataaa

SEQ ID NO: 13546 - RNA, 94 nt, synthetic construct
  source 1..94: mol_type = other RNA
aaaaaaaaaaaaaaaaaaaaaaaaaaaaataaaataaataaataaataaataaataaataaatatataaatataaatataaaaaaaaatataaa

SEQ ID NO: 13547 - RNA, 94 nt, synthetic construct
  source 1..94: mol_type = other RNA
aaaaaaaaaaaaaaaaaaaaaaaaaaaaaaaaaaaaaaaataaataaaaaaaaaaaaaaaaaaaaaaaaaaaaaaataaaaaataaatatatag

SEQ ID NO: 13548 - RNA, 94 nt, synthetic construct
  source 1..94: mol_type = other RNA
aaataaatataaataaataaataaaaaaaaaaaaataaaataaaaaaaaaaaaaaaaaatataaatataaaaaaaaaaaaaaaaaaaaaatata

SEQ ID NO: 13549 - RNA, 94 nt, synthetic construct
  source 1..94: mol_type = other RNA
aaataaatataaataaataaataaaataaaaaaaaaaaaataaaaaaaaaaaaaaaaaatataaatataaaaaaaaaaaaaaaaaaaaaatata

SEQ ID NO: 13550 - RNA, 94 nt, synthetic construct
  source 1..94: mol_type = other RNA
aaataaatataaataaataaataaaaaaaaaaaaaaaaaataaaaaaaaaaaaaaaaaatataaatataaaaaaaaaataaaaaaaaaaatata

SEQ ID NO: 13551 - RNA, 94 nt, synthetic construct
  source 1..94: mol_type = other RNA
aaaaaaaaaaaaaaaaaaaaaaaaaaaaataaaaaaaaaataaataaaaaaaaaaaaaaaaaaaaaaaaaaataaataaataataaatatataa

SEQ ID NO: 13552 - RNA, 94 nt, synthetic construct
  source 1..94: mol_type = other RNA
aaaaaaaaaaaaaaaaaaaaaaaaaaaaataaaaaaaaaataaataaaaaaaaaaaaaaaaaaaaaaaaaaataaataataaataaatatataa

SEQ ID NO: 13553 - RNA, 94 nt, synthetic construct
  source 1..94: mol_type = other RNA
aaatataaataaaaaaaaaaaaaaaaaaaaataaataaataaataaaaaaaaaaaaaaaaaaaaaaaaaaataaaaaaaaaataaataaaaata

SEQ ID NO: 13554 - RNA, 94 nt, synthetic construct
  source 1..94: mol_type = other RNA
aaaaaaaaaaaaaaaaaaaaaaaaaaaaataaaaaaaaaataaataaataaaaaaaaaaaaaaaaaaaaaaataaataaataataaatatataa

SEQ ID NO: 13555 - RNA, 94 nt, synthetic construct
  source 1..94: mol_type = other RNA
aaaaaaaaaaaaaaaaaaaaaaaaaaaaataaaaaaaaaataaataaaaaaaaaaaaaaaaaaaaaaataaataaataaataataaatatataa

SEQ ID NO: 13556 - RNA, 95 nt, synthetic construct
  source 1..95: mol_type = other RNA
aaaaaaaaaaaaaaaaaaaaataaaaaaaaaaaaaaaaaaaaaaaaaaaaaaaaaaaataaataaaaaaaaaataaataaataaatataaatata

SEQ ID NO: 13557 - RNA, 95 nt, synthetic construct
  source 1..95: mol_type = other RNA
aaaaaaaaaaaaaaaaataaataaaaaaaaaaaaaaaaaaaaaaaaaaaaaaaaaaaataaataaaaaaaaaataaataaataaatataaatata

SEQ ID NO: 13558 - RNA, 95 nt, synthetic construct
  source 1..95: mol_type = other RNA
aaaaaaaaaaaaaaaaataaataaataaaaaaaaaaaaaaaaaaaaaaaaaaaaaaaataaataaaaaaaaaataaataaataaatataaatata

SEQ ID NO: 13559 - RNA, 95 nt, synthetic construct
  source 1..95: mol_type = other RNA
aaaaaaaaaaaaaaaaataaataaataaaaaaaaaaaaaaaaaaaaaaaaaaaaaaaataaataaaaaataaataaataaataaatataaatata

SEQ ID NO: 13560 - RNA, 95 nt, synthetic construct
  source 1..95: mol_type = other RNA
aaaaaaaaaaaaaaaaataaataaataaaaaaaaaaaaaaaaaaaaaaaaaaaaaaaataaataaataaaaaataaataaataaatataaatata

SEQ ID NO: 13561 - RNA, 95 nt, synthetic construct
  source 1..95: mol_type = other RNA
aaaaaaaaaaaaaaaaataaataaataaaaaaaaaaaaaaaaaaaaaaaaaaaataaataaataaaaaaaaaataaataaataaatataaatata

SEQ ID NO: 13562 - RNA, 95 nt, synthetic construct
  source 1..95: mol_type = other RNA
aaaaaaaaaaaaaaaaataaataaataaaaaaaaaaaaaaaaaaaaaaaaaaaataaataaataaaaaataaataaataaataaatataaatata

SEQ ID NO: 13563 - RNA, 95 nt, synthetic construct
  source 1..95: mol_type = other RNA
aaaaaaaaaaaaaaaaataaataaataaaaaaaaaaaaaaaaaaaaaaaaaaaataaataaataaataaaaaataaataaataaatataaatata

SEQ ID NO: 13564 - RNA, 95 nt, synthetic construct
  source 1..95: mol_type = other RNA
aaaaaaaaaaaaaaaaataaataaataaaaaaaaaaaaaaaaaaaaaaaaaaaaaaaataaataaataataaataaataaataaatataaatata

SEQ ID NO: 13565 - RNA, 95 nt, synthetic construct
  source 1..95: mol_type = other RNA
aaaaaaaaaaaaaaaaataaataaataaaaaaaaaaaaaaaaaaaaaaaaaaaaaaaataaataaataaataataaataaataaatataaatata

SEQ ID NO: 13566 - RNA, 95 nt, synthetic construct
  source 1..95: mol_type = other RNA
aaaaaaaaaaaaaaaaataaataaataaaaaaaaaaaaaaaaaaaaaaaaaaaataaataaataaataataaataaataaataaatataaatata

SEQ ID NO: 13567 - RNA, 95 nt, synthetic construct
  source 1..95: mol_type = other RNA
aaaaaaaaaaaaaaaaataaataaataaaaaaaaaaaaaaaaaaaaaaaaaaaataaataaataaataaataataaataaataaatataaatata

SEQ ID NO: 13568 - RNA, 95 nt, synthetic construct
  source 1..95: mol_type = other RNA
aaaaaaaaaaaaaaaaataaataaatataaaaaaaaaaaaaaaaaaaaaaaaaaaaaataaataaaaaataaataaataaataaatataaatata

SEQ ID NO: 13569 - RNA, 95 nt, synthetic construct
  source 1..95: mol_type = other RNA
aaaaaaaaaaaaaaaaataaataaataaaaaaaaaaaaaaaaaaaaaaaaaaaaaaaataaataaatataaaataaataaataaatataaatata

SEQ ID NO: 13570 - RNA, 95 nt, synthetic construct
  source 1..95: mol_type = other RNA
aaaaaaaaaaaaaaaaataaataaatataaaaaaaaaaaaaaaaaaaaaaaaaaaaaataaataaataaaaaataaataaataaatataaatata

SEQ ID NO: 13571 - RNA, 95 nt, synthetic construct
  source 1..95: mol_type = other RNA
aaaaaaaaaaaaaaaaataaataaataaaaaaaaaaaaaaaaaaaaaaaaaaaataaataaataaatataaaataaataaataaatataaatata

SEQ ID NO: 13572 - RNA, 95 nt, synthetic construct
  source 1..95: mol_type = other RNA
aaaaaaaaaaaaaaaaataaataaatataaaaaaaaaaaaaaaaaaaaaaaaaataaataaataaataaaaaataaataaataaatataaatata

SEQ ID NO: 13573 - RNA, 95 nt, synthetic construct
  source 1..95: mol_type = other RNA
aaaaaaaaaaaaaaaaataaataaataaaaaaaaaaaaaaaaaaaaaaaaaatataaataaataaaaaataaataaataaataaatataaatata

SEQ ID NO: 13574 - RNA, 95 nt, synthetic construct
  source 1..95: mol_type = other RNA
aaaaaaaaaaaaaaaaataaataaataaaaaaaaaaaaaaaaaaaaaaaaaatataaataaataaataaaaaataaataaataaatataaatata

SEQ ID NO: 13575 - RNA, 95 nt, synthetic construct
  source 1..95: mol_type = other RNA
aaaaaaaaaaaaaaaaataaataaataaaaaaaaaaaaaaaaaaaaaataaatataaataaataaataaaaaataaataaataaatataaatata

SEQ ID NO: 13576 - RNA, 95 nt, synthetic construct
  source 1..95: mol_type = other RNA
aaaaaaaaaaaaaaaaataaataaataaaaaaaaaaaaaaaaaaaaaataaatataaataaataaaaaataaataaataaataaatataaatata

SEQ ID NO: 13577 - RNA, 95 nt, synthetic construct
  source 1..95: mol_type = other RNA
aaaaaaaaaaaaaaaaataaataaataaaaaaaaaaaaaaaaaataaataaatataaataaataaaaaataaataaataaataaatataaatata

SEQ ID NO: 13578 - RNA, 95 nt, synthetic construct
  source 1..95: mol_type = other RNA
aaaaaaaaaaaaaaaaataaataaatataaaaaaaaaaaaaaaaaaaaaaaaaaaaaataaataaataataaataaataaataaatataaatata

SEQ ID NO: 13579 - RNA, 95 nt, synthetic construct
  source 1..95: mol_type = other RNA
aaaaaaaaaaaaaaaaataaataaatataaaaaaaaaaaaaaaaaaaaaaaaaaaaaataaataaataaataataaataaataaatataaatata

SEQ ID NO: 13580 - RNA, 95 nt, synthetic construct
  source 1..95: mol_type = other RNA
aaaaaaaaaaaaaaaaataaataaataaaaaaaaaaaaaaaaaaaaaaaaaatataaataaataaataataaataaataaataaatataaatata

SEQ ID NO: 13581 - RNA, 95 nt, synthetic construct
  source 1..95: mol_type = other RNA
aaaaaaaaaaaaaaaaataaataaatataaaaaaaaaaaaaaaaaaaaaaaaaataaataaataaataataaataaataaataaatataaatata

SEQ ID NO: 13582 - RNA, 95 nt, synthetic construct
  source 1..95: mol_type = other RNA
aaaaaaaaaaaaaaaaataaataaataaaaaaaaaaaaaaaaaaaaaaaaaatataaataaataaataaataataaataaataaatataaatata

SEQ ID NO: 13583 - RNA, 95 nt, synthetic construct
  source 1..95: mol_type = other RNA
aaaaaaaaaaaaaaaaaaaaataaaaaaaaaaaaaaaaaaaaaaaaaaaaaaaaaaaataaataaaaaaaaaataaataaataaaaataaatata

SEQ ID NO: 13584 - RNA, 95 nt, synthetic construct
  source 1..95: mol_type = other RNA
aaaaaaaaaaaaaaaaataaataaataaaaaaaaaaaaaaaaaaaaaataaatataaataaataaataataaataaataaataaatataaatata

SEQ ID NO: 13585 - RNA, 95 nt, synthetic construct
  source 1..95: mol_type = other RNA
aaaaaaaaaaaaaaaaataaataaataaaaaaaaaaaaaaaaaataaataaatataaataaataaataataaataaataaataaatataaatata

SEQ ID NO: 13586 - RNA, 95 nt, synthetic construct
  source 1..95: mol_type = other RNA
aaaaaaaaaaaaaaaaataaataaataaaaaaaaaaaaaaaaaataaataaatataaataaataaataaataataaataaataaatataaatata

SEQ ID NO: 13587 - RNA, 95 nt, synthetic construct
  source 1..95: mol_type = other RNA
aaaaaaaaaaaaaaaaataaataaataaaaaaaaaaaaaaaaaaaaaaaaaaaaaaaataaataaaaaaaaaataaataaataaataaaaatata

SEQ ID NO: 13588 - RNA, 95 nt, synthetic construct
  source 1..95: mol_type = other RNA
aaaaaaaaaaaaaaaaataaataaatataaaaaaaaaaaaaaaaaaaaaaaaaaaaaataaataaatataaaataaataaataaatataaatata

SEQ ID NO: 13589 - RNA, 95 nt, synthetic construct
  source 1..95: mol_type = other RNA
aaaaaaaaaaaaaaaaataaataaataaaaaaaaaaaaaaaaaaaaaaaaaatataaataaataaatataaaataaataaataaatataaatata

SEQ ID NO: 13590 - RNA, 95 nt, synthetic construct
  source 1..95: mol_type = other RNA
aaaaaaaaaaaaaaaaataaataaatataaaaaaaaaaaaaaaaaaaaaaaaaataaataaataaatataaaataaataaataaatataaatata

SEQ ID NO: 13591 - RNA, 95 nt, synthetic construct
  source 1..95: mol_type = other RNA
aaaaaaaaaaaaaaaaataaataaataaaaaaaaaaaaaaaaaaaaaataaatataaataaataaatataaaataaataaataaatataaatata

SEQ ID NO: 13592 - RNA, 95 nt, synthetic construct
  source 1..95: mol_type = other RNA
aaaaaaaaaaaaaaaaataaataaataaaaaaaaaaaaaaaatataaataaatataaataaataaaaaaaaaataaataaataaatataaatata

SEQ ID NO: 13593 - RNA, 95 nt, synthetic construct
  source 1..95: mol_type = other RNA
aaaaaaaaaaaaaaaaataaataaataaaaaaaaaaaaaaaatataaataaatataaataaataaaaaataaataaataaataaatataaatata

SEQ ID NO: 13594 - RNA, 95 nt, synthetic construct
  source 1..95: mol_type = other RNA
aaaaaaaaaaaaaaaaataaataaataaaaaaaaaaaaaaaatataaataaatataaataaataaataaaaaataaataaataaatataaatata

SEQ ID NO: 13595 - RNA, 95 nt, synthetic construct
  source 1..95: mol_type = other RNA
aaaaaaaaaaaaaaaaataaataaataaaaaaaaaaaaaaaaaataaataaatataaataaataaatataaaataaataaataaatataaatata

SEQ ID NO: 13596 - RNA, 95 nt, synthetic construct
  source 1..95: mol_type = other RNA
aaaaaaaaaaaaaaaaataaataaataaaaaaaaaaaaaaaaaaaaaaaaaaaaaaaataaataaaaaaaaaatatataaataaatataaatata

SEQ ID NO: 13597 - RNA, 95 nt, synthetic construct
  source 1..95: mol_type = other RNA
aaaataaataaataaaaaaaaaaaaaaaaaaaaaaataaataaataaataaaaaaaaaaaaaaaaaaaaaaaaaaaaaaaaaaatataaatataa

SEQ ID NO: 13598 - RNA, 95 nt, synthetic construct
  source 1..95: mol_type = other RNA
aaaaataaaaaaaaaaaaaaaaaaaaaaaaaataaaaaaaaaaaaaaaaaaaaaaaaaaaaaaaaaatataaatataaataaataaataaataaa

SEQ ID NO: 13599 - RNA, 95 nt, synthetic construct
  source 1..95: mol_type = other RNA
aaaaaaaaaaaaaaaaataaataaaaaaaaaaaaaaaaaaaaaaaaaaaaaaaaaaaataaataaaaaaaaaataaataaatatatataaatata

SEQ ID NO: 13600 - RNA, 95 nt, synthetic construct
  source 1..95: mol_type = other RNA
aaaaaaaaaaaaaaaaataaataaataaaaaaaaaaaaaaaaaaaaaaaaaaaaaaaataaataaaaaaaaaataaataaataaatatatatata

SEQ ID NO: 13601 - RNA, 95 nt, synthetic construct
  source 1..95: mol_type = other RNA
aaaaaaaaaaaaaaaaataaataaataaaaaaaaaaaaaaaatataaataaatataaataaataaataataaataaataaataaatataaatata

SEQ ID NO: 13602 - RNA, 95 nt, synthetic construct
  source 1..95: mol_type = other RNA
aaaaaaaaaaaaaaaaataaataaataaaaaaaaaaaaaaaatataaataaatataaataaataaataaataataaataaataaatataaatata

SEQ ID NO: 13603 - RNA, 95 nt, synthetic construct
  source 1..95: mol_type = other RNA
aaaaaaaaaaaaaaaaataaataaaaaaaaaaaaaaaaaaaaaaaaaaaataaaaaaataaataaaaaaaaaataaataaataaatataaatata

SEQ ID NO: 13604 - RNA, 95 nt, synthetic construct
  source 1..95: mol_type = other RNA
aaaataaaaaaaaaaaataaataaaaaaaaaaaaaaaaaaaaaaaaaaaaaaaaaaaataaataaaaaaaaaataaataaataaatataaatata

SEQ ID NO: 13605 - RNA, 95 nt, synthetic construct
  source 1..95: mol_type = other RNA
aaaaaaaaaaaaaaaaataaataaataaaaaaaaaaaaataaaaaaaaaaaaaaaaaataaataaaaaaaaaataaataaataaatataaatata

SEQ ID NO: 13606 - RNA, 95 nt, synthetic construct
  source 1..95: mol_type = other RNA
aaaaaaaaaaaaaaaaataaataaataaaaaaaaaaaaaaaaataaaaaaaaaaaaaataaataaataaaaaataaataaataaatataaatata

SEQ ID NO: 13607 - RNA, 95 nt, synthetic construct
  source 1..95: mol_type = other RNA
aaaaaaaaaaaaaaaaataaataaataaaaaaaaaaaaaaaaataaaaaaaaaaaaaataaataaaaaataaataaataaataaatataaatata

SEQ ID NO: 13608 - RNA, 95 nt, synthetic construct
  source 1..95: mol_type = other RNA
aaaaaaaaaaaaaaaaataaataaataaaaaaaataaataaatataaataaatataaataaataaataataaataaataaataaatataaatata

SEQ ID NO: 13609 - RNA, 95 nt, synthetic construct
  source 1..95: mol_type = other RNA
aaaaaaaaaataaaaaataaataaataaaaaaaaaaaaaaaaaaaaaaaaaaaaaaaataaataaataaaaaataaataaataaatataaatata

SEQ ID NO: 13610 - RNA, 95 nt, synthetic construct
  source 1..95: mol_type = other RNA
aaaaaaaaaataaaaaataaataaataaaaaaaaaaaaaaaaaaaaaaaaaaaaaaaataaataaaaaataaataaataaataaatataaatata

SEQ ID NO: 13611 - RNA, 95 nt, synthetic construct
  source 1..95: mol_type = other RNA
aaaaaaaaaaaaaaaaataaataaataaaaaaaaaaaaaaaataaaaaaaaaaaaaaataaataaataaaaaataaataaataaatataaatata

SEQ ID NO: 13612 - RNA, 95 nt, synthetic construct
  source 1..95: mol_type = other RNA
aaaaaaaaaaataaaaataaataaataaaaaaaaaaaaaaaaaaaaaaaaaaaaaaaataaataaaaaataaataaataaataaatataaatata

SEQ ID NO: 13613 - RNA, 95 nt, synthetic construct
  source 1..95: mol_type = other RNA
aaaaaaaaaaaataaaataaataaataaaaaaaaaaaaaaaaaaaaaaaaaaaaaaaataaataaataaaaaataaataaataaatataaatata

SEQ ID NO: 13614 - RNA, 95 nt, synthetic construct
  source 1..95: mol_type = other RNA
aaaaaaaaaataaaaaataaataaataaaaaaaaaaaaaaaaaaaaaaaaaaaataaataaataaaaaataaataaataaataaatataaatata

SEQ ID NO: 13615 - RNA, 95 nt, synthetic construct
  source 1..95: mol_type = other RNA
aaaaaaaaaataaaaaataaataaataaaaaaaaaaaaaaaaaaaaaaaaaaaataaataaataaataaaaaataaataaataaatataaatata

SEQ ID NO: 13616 - RNA, 95 nt, synthetic construct
  source 1..95: mol_type = other RNA
aaaaaaaaaaataaaaataaataaataaaaaaaaaaaaaaaaaaaaaaaaaaaataaataaataaaaaataaataaataaataaatataaatata

SEQ ID NO: 13617 - RNA, 95 nt, synthetic construct
  source 1..95: mol_type = other RNA
aaaaaaaaaaaaaaaaataaataaataaaaaaaaaaaaaaaaataaaaaaaaaataaataaataaataaaaaataaataaataaatataaatata

SEQ ID NO: 13618 - RNA, 95 nt, synthetic construct
  source 1..95: mol_type = other RNA
aaaaaaaaaaaaaaaaataaataaataaaaaaaaaaaaaaaaataaaaaaaaaataaataaataaaaaataaataaataaataaatataaatata

SEQ ID NO: 13619 - RNA, 95 nt, synthetic construct
  source 1..95: mol_type = other RNA
aaaaaaaaaaataaaaataaataaataaaaaaaaaaaaaaaaaaaaaaaaaaaataaataaataaataaaaaataaataaataaatataaatata

SEQ ID NO: 13620 - RNA, 95 nt, synthetic construct
  source 1..95: mol_type = other RNA
aaaaaaaaaaaataaaataaataaataaaaaaaaaaaaaaaaaaaaaaaaaaaataaataaataaaaaataaataaataaataaatataaatata

SEQ ID NO: 13621 - RNA, 95 nt, synthetic construct
  source 1..95: mol_type = other RNA
aaaaaaaaaaaaaaaaataaataaataaaaaaaaaaaaaaaataaaaaaaaaaataaataaataaaaaataaataaataaataaatataaatata

SEQ ID NO: 13622 - RNA, 95 nt, synthetic construct
  source 1..95: mol_type = other RNA
aaaaaaaaaaaaaaaaataaataaataaaaaaaaaaaaaaaaaataaataaaaataaataaataaaaaataaataaataaataaatataaatata

SEQ ID NO: 13623 - RNA, 95 nt, synthetic construct
  source 1..95: mol_type = other RNA
aaaaaaaaaaaaaaaaataaataaataaaaaaaaaaaaaaaaaaaaaaaaaaaaaaaataaataaatatataataaataaataaatataaatata

SEQ ID NO: 13624 - RNA, 95 nt, synthetic construct
  source 1..95: mol_type = other RNA
aaaaaaaaaaaaaaaaataaataaatataaaaaaaaaaaaaaaaaaaaaaaatataaataaataaatataaaataaataaataaatataaatata

SEQ ID NO: 13625 - RNA, 95 nt, synthetic construct
  source 1..95: mol_type = other RNA
aaaaaaaaaaaaaaaaataaataaataaaaaaaaaaaaaaaatataaataaatataaataaataaatataaaataaataaataaatataaatata

SEQ ID NO: 13626 - RNA, 95 nt, synthetic construct
  source 1..95: mol_type = other RNA
aaaaaaaaaaaaaaaaataaataaataaaaaaaataaataaatataaataaatataaataaataaatataaaataaataaataaatataaatata

SEQ ID NO: 13627 - RNA, 95 nt, synthetic construct
  source 1..95: mol_type = other RNA
aaaaaaaaaaaaaaaaataaataaatataaaaaataaataaatataaataaatataaataaataaaaaataaataaataaataaatataaatata

SEQ ID NO: 13628 - RNA, 95 nt, synthetic construct
  source 1..95: mol_type = other RNA
aaaaaaaaaaaaaaaaataaataaataaaaaaaaaaaaaatatataaataaatataaataaataaaaaaaaaataaataaataaatataaatata

SEQ ID NO: 13629 - RNA, 95 nt, synthetic construct
  source 1..95: mol_type = other RNA
aaaaaaaaaaaaaaaaataaataaataaaaaaaaaataaatatataaataaatataaataaataaaaaaaaaataaataaataaatataaatata

SEQ ID NO: 13630 - RNA, 95 nt, synthetic construct
  source 1..95: mol_type = other RNA
aaaaaaaaaaaaaaaaataaataaataaaaaaaaaaaaaatatataaataaatataaataaataaaaaataaataaataaataaatataaatata

SEQ ID NO: 13631 - RNA, 95 nt, synthetic construct
  source 1..95: mol_type = other RNA
aaaaaaaaaaaaaaaaaaaataaatataaataaataaataaaataaataaataaatataaataaatataaataaaaaaaaaaaaaaaaaaaataa

SEQ ID NO: 13632 - RNA, 95 nt, synthetic construct
  source 1..95: mol_type = other RNA
aaaaaaaaaaaaaaaaataaataaaaaaaaaaaaaaaaaaaaaaaaaaaaaaaaaaaataaataataaaaaaataaataaataaatataaatata

SEQ ID NO: 13633 - RNA, 95 nt, synthetic construct
  source 1..95: mol_type = other RNA
aaaaaaaaaaaaaaaataaataaatataaataaataaataaaataaataaataaatataaataaatataaataaaaaaaaaaaaaaaaaaaataa

SEQ ID NO: 13634 - RNA, 95 nt, synthetic construct
  source 1..95: mol_type = other RNA
aaaaaaaaaaaaaaaaataaataaataaaaaataaataaatatataaataaatataaataaataaaaaataaataaataaataaatataaatata

SEQ ID NO: 13635 - RNA, 95 nt, synthetic construct
  source 1..95: mol_type = other RNA
aaaaaaaaaaaaaaaaaaaaataaataaaaaaaaaaaaaaaaataaaaaaaaaaaaaataaataaataataaataaataaataaatataaatata

SEQ ID NO: 13636 - RNA, 95 nt, synthetic construct
  source 1..95: mol_type = other RNA
aaaaaaaaaaataaaaaaaaataaataaaaaaaaaaaaaaaaaaaaaaaaaaaaaaaataaataaataataaataaataaataaatataaatata

SEQ ID NO: 13637 - RNA, 95 nt, synthetic construct
  source 1..95: mol_type = other RNA
aaaaaaaaaaaaaaaaataaataaataaaaaaaaaaaaaaaaaaaaaaaaaaaataaataaataaaaaaataataaataaataaatataaatata

SEQ ID NO: 13638 - RNA, 95 nt, synthetic construct
  source 1..95: mol_type = other RNA
aaaaaaaaaaataaaaataaataaataaaaaaaaaaaaaaaaaaaaaaaaaaaaaaaataaataaataataaataaataaataaatataaatata

SEQ ID NO: 13639 - RNA, 95 nt, synthetic construct
  source 1..95: mol_type = other RNA
aaaaaaaaaataaaaaataaataaataaaaaaaaaaaaaaaaaaaaaaaaaaaaaaaataaataaataataaataaataaataaatataaatata

SEQ ID NO: 13640 - RNA, 95 nt, synthetic construct
  source 1..95: mol_type = other RNA
aaaaaaaaaaaaaaaaataaataaataaaaaaaaaaaaaaaaataaaaaaaaaaaaaataaataaataataaataaataaataaatataaatata

SEQ ID NO: 13641 - RNA, 95 nt, synthetic construct
  source 1..95: mol_type = other RNA
aaaaaaaaaataaaaaataaataaataaaaaaaaaaaaaaaaaaaaaaaaaaaaaaaataaataaataaataataaataaataaatataaatata

SEQ ID NO: 13642 - RNA, 95 nt, synthetic construct
  source 1..95: mol_type = other RNA
aaaaaaaaaaataaaaataaataaataaaaaaaaaaaaaaaaaaaaaaaaaaaaaaaataaataaataaataataaataaataaatataaatata

SEQ ID NO: 13643 - RNA, 95 nt, synthetic construct
  source 1..95: mol_type = other RNA
aaaaaaaaaaaaaaaaataaataaataaaaaaaaaaaaaaaataaaaaaaaaaaaaaataaataaataataaataaataaataaatataaatata

SEQ ID NO: 13644 - RNA, 95 nt, synthetic construct
  source 1..95: mol_type = other RNA
aaaaaaaaaaaataaaataaataaataaaaaaaaaaaaaaaaaaaaaaaaaaaaaaaataaataaataataaataaataaataaatataaatata

SEQ ID NO: 13645 - RNA, 95 nt, synthetic construct
  source 1..95: mol_type = other RNA
aaaaaaaaaaataaaaaaaaataaataaaaaaaaaaaaaaaaaaaaaaaaaaaataaataaataaataataaataaataaataaatataaatata

SEQ ID NO: 13646 - RNA, 95 nt, synthetic construct
  source 1..95: mol_type = other RNA
aaaaaaaaaaaaaaaaataaataaataaaaaaaaaaaaaaaaataaaaaaaaaaaaaataaataaataaataataaataaataaatataaatata

SEQ ID NO: 13647 - RNA, 95 nt, synthetic construct
  source 1..95: mol_type = other RNA
aaaaaaaaaaaaaaaaataaataaataaaaaaaaaaaaaaaataaaaaaaaaaaaaaataaataaataaataataaataaataaatataaatata

SEQ ID NO: 13648 - RNA, 95 nt, synthetic construct
  source 1..95: mol_type = other RNA
aaaaaaaaaaaaaaaaataaataaataaaaaaaaaaaaaaaaaataaaaaaaaaaaaataaataaataataaataaataaataaatataaatata

SEQ ID NO: 13649 - RNA, 95 nt, synthetic construct
  source 1..95: mol_type = other RNA
aaaaaaaaaaaaaaaaataaataaataaaaaaaaaaaaaaaaaaaaaataaaaaaaaataaataaataataaataaataaataaatataaatata

SEQ ID NO: 13650 - RNA, 95 nt, synthetic construct
  source 1..95: mol_type = other RNA
aaaaaaaaaataaaaaataaataaataaaaaaaaaaaaaaaaaaaaaaaaaaaataaataaataaataataaataaataaataaatataaatata

SEQ ID NO: 13651 - RNA, 95 nt, synthetic construct
  source 1..95: mol_type = other RNA
aaaaaaaaaataaaaaataaataaataaaaaaaaaaaaaaaaaaaaaaaaaaaataaataaataaataaataataaataaataaatataaatata

SEQ ID NO: 13652 - RNA, 95 nt, synthetic construct
  source 1..95: mol_type = other RNA
aaaaaaaaaaaaaaaaataaataaataaaaaaaaaaaaaaaaataaaaaaaaaataaataaataaataataaataaataaataaatataaatata

SEQ ID NO: 13653 - RNA, 95 nt, synthetic construct
  source 1..95: mol_type = other RNA
aaaaaaaaaaataaaaataaataaataaaaaaaaaaaaaaaaaaaaaaaaaaaataaataaataaataataaataaataaataaatataaatata

SEQ ID NO: 13654 - RNA, 95 nt, synthetic construct
  source 1..95: mol_type = other RNA
aaaaaaaaaaataaaaataaataaataaaaaaaaaaaaaaaaaaaaaaaaaaaataaataaataaataaataataaataaataaatataaatata

SEQ ID NO: 13655 - RNA, 95 nt, synthetic construct
  source 1..95: mol_type = other RNA
aaaaaaaaaaaaaaaaataaataaataaaaaaaaaaaaaaaataaaaaaaaaaataaataaataaataataaataaataaataaatataaatata

SEQ ID NO: 13656 - RNA, 95 nt, synthetic construct
  source 1..95: mol_type = other RNA
aaaaaaaaaaaaaaaaataaataaataaaaaaaaaaaaaaaaaataaataaaaaaaaataaataaataataaataaataaataaatataaatata

SEQ ID NO: 13657 - RNA, 95 nt, synthetic construct
  source 1..95: mol_type = other RNA
aaaaaaaaaaaataaaataaataaataaaaaaaaaaaaaaaaaaaaaaaaaaaataaataaataaataataaataaataaataaatataaatata

SEQ ID NO: 13658 - RNA, 95 nt, synthetic construct
  source 1..95: mol_type = other RNA
aaaaaaaaaaaaaaaaataaataaataaaaaaaaaaaaaaaaaataaaaaaaaataaataaataaataataaataaataaataaatataaatata

SEQ ID NO: 13659 - RNA, 95 nt, synthetic construct
  source 1..95: mol_type = other RNA
aaaaaaaaaaaaaaaaataaataaataaaaaaaaaaaaaaaaaaaaaataaaaataaataaataaataataaataaataaataaatataaatata

SEQ ID NO: 13660 - RNA, 96 nt, synthetic construct
  source 1..96: mol_type = other RNA
aaaaaaaaaaaaaataaatataaaaaaaaaaaaaaaaataaataaaaaaaaaaaaaaaaaaaaaaaaaaaaaaataaataaataaataaatatata

SEQ ID NO: 13661 - RNA, 96 nt, synthetic construct
  source 1..96: mol_type = other RNA
aaaaaaaaaaaaaataaatataaataaaaaaaaaaaaataaataaaaaaaaaaaaaaaaaaaaaaaaaaaaaaataaataaataaataaatatata

SEQ ID NO: 13662 - RNA, 96 nt, synthetic construct
  source 1..96: mol_type = other RNA
aaaaaaaaaaaaaataaatataaataaaaaaaaataaataaataaaaaaaaaaaaaaaaaaaaaaaaaaaaaaataaataaataaataaatatata

SEQ ID NO: 13663 - RNA, 96 nt, synthetic construct
  source 1..96: mol_type = other RNA
aaaaaaaaaaaaaataaataaaaaaaaaaaaaaaaaaaaaaaaaaaaaaaaaaaataaaaaaaaaataaataaaaaaaaaaaaaaaaaaaaatata

SEQ ID NO: 13664 - RNA, 96 nt, synthetic construct
  source 1..96: mol_type = other RNA
aaaaaaaaaataaataaataaaaaaaaaaaaaaaaaaaaaaaaaaaaaaaaaaaataaaaaaaaaataaataaaaaaaaaaaaaaaaaaaaatata

SEQ ID NO: 13665 - RNA, 96 nt, synthetic construct
  source 1..96: mol_type = other RNA
aaaaaaaaaataaataaataaataaaaaaaaaaaaaaaaaaaaaaaaaaaaaaaataaaaaaaaaataaataaaaaaaaaaaaaaaaaaaaatata

SEQ ID NO: 13666 - RNA, 96 nt, synthetic construct
  source 1..96: mol_type = other RNA
aaaaaaaaaataaataaataaaaaaaaaaaaaaaaaaaaaaaaaaaaaaaaaaaataaataaaaaataaataaaaaaaaaaaaaaaaaaaaatata

SEQ ID NO: 13667 - RNA, 96 nt, synthetic construct
  source 1..96: mol_type = other RNA
aaaaaaaaaataaataaataaaaaaaaaaaaaaaaaaaaaaaaaaaaaaaaaaaataaaaaaaaaataaataaaaaaaaaaaaaaaaataaatata

SEQ ID NO: 13668 - RNA, 96 nt, synthetic construct
  source 1..96: mol_type = other RNA
aaaaaaaaaataaataaataaataaaaaaaaaaaaaaaaaaaaaaaaaaaaaaaataaataaaaaataaataaaaaaaaaaaaaaaaaaaaatata

SEQ ID NO: 13669 - RNA, 96 nt, synthetic construct
  source 1..96: mol_type = other RNA
aaaaaaaaaataaataaataaataaaaaaaaaaaaaaaaaaaaaaaaaaaaaaaataaaaaaaaaataaataaaaaaaaaaaaaaaaataaatata

SEQ ID NO: 13670 - RNA, 96 nt, synthetic construct
  source 1..96: mol_type = other RNA
aaaaaaaaaataaataaataaataaaaaaaaaaaaaaaaaaaaaaaataaataaataaaaaaaaaataaataaaaaaaaaaaaaaaaaaaaatata

SEQ ID NO: 13671 - RNA, 96 nt, synthetic construct
  source 1..96: mol_type = other RNA
aaaaaaaaaataaataaataaataaaaaaaaaaaaaaaaaaaaaaaataaataaataaataaaaaataaataaaaaaaaaaaaaaaaaaaaatata

SEQ ID NO: 13672 - RNA, 96 nt, synthetic construct
  source 1..96: mol_type = other RNA
aaaaaaaaaaaaaataaatataaataaaaaaaaaaaaataaataaaaaaaaaaaaaaaaaaaaaaaaaaaaatataaataaataaataaatatata

SEQ ID NO: 13673 - RNA, 96 nt, synthetic construct
  source 1..96: mol_type = other RNA
aaaaaaaaaaaatataaatataaataaaaaaaaaaaaataaataaaaaaaaaaaaaaaaaaaaaaaaaaaaaaataaataaataaataaatatata

SEQ ID NO: 13674 - RNA, 96 nt, synthetic construct
  source 1..96: mol_type = other RNA
aaaaaaaaaaaaaaaaaataaataaatataaaaaaaaaaaaaaaaaataaataaataaataaataaatataaataaataaaaaaaaaaaatatata

SEQ ID NO: 13675 - RNA, 96 nt, synthetic construct
  source 1..96: mol_type = other RNA
aaaaaaaaaaaaaataaatataaataaaaaaaaaaaaataaataaaaaaaaaaaaaaaaaaaaaaaaaaaaaaataaataaataaataaatataaa

SEQ ID NO: 13676 - RNA, 96 nt, synthetic construct
  source 1..96: mol_type = other RNA
aaaaaaaaaaaaaaaaaaaaaaaataaataaatataaataaaaaaaaaaaaaaaaaaaaaaaaaataaaaaaaataaatataaataaataaataaa

SEQ ID NO: 13677 - RNA, 96 nt, synthetic construct
  source 1..96: mol_type = other RNA
aaaaaaaaaaaaaataaatataaataaaaaaaaaaaaataaataaaaaaaaaaaaaaaaaaaaaaaaaaataaataaataaataaataaatataaa

SEQ ID NO: 13678 - RNA, 96 nt, synthetic construct
  source 1..96: mol_type = other RNA
aaaaaaaaaataaataaatataaataaaaaaaaaaaaataaataaaaaaaaaaaaaaaaaaaaaaaaaaaaaaataaataaataaataaatataaa

SEQ ID NO: 13679 - RNA, 96 nt, synthetic construct
  source 1..96: mol_type = other RNA
aaaaaaaaaaaaaaaaaaaaaaaataaataaatataaataaaaaaaaaaaaaaaaaaaaaataaataaaaaaaataaatataaataaataaataaa

SEQ ID NO: 13680 - RNA, 96 nt, synthetic construct
  source 1..96: mol_type = other RNA
aaaaaaaaaaaaaataaatataaataaaaaaaaaaaaataaataaataaaaaaaaaaaaaaaaaaaaaaataaataaataaataaataaatataaa

SEQ ID NO: 13681 - RNA, 96 nt, synthetic construct
  source 1..96: mol_type = other RNA
aaaaaaaaaataaataaatataaataaaaaaaaaaaaataaataaaaaaaaaaaaaaaaaaaaaaaaaaataaataaataaataaataaatataaa

SEQ ID NO: 13682 - RNA, 96 nt, synthetic construct
  source 1..96: mol_type = other RNA
aaatataaataaataaataaataaataaatataaatataaaaaaaataaatataaaaaaaaaaaaaaaaaaaaaaaaataaatataaataaatata

SEQ ID NO: 13683 - RNA, 96 nt, synthetic construct
  source 1..96: mol_type = other RNA
aaaaaaaaaaaaaataaatataaataaaaaaaaataaataaataaataaaaaaaaaaaaaaaaaaaaaaataaataaataaataaataaatataaa

SEQ ID NO: 13684 - RNA, 96 nt, synthetic construct
  source 1..96: mol_type = other RNA
aaaaaaaaaataaataaatataaataaaaaaaaaaaaataaataaataaaaaaaaaaaaaaaaaaaaaaataaataaataaataaataaatataaa

SEQ ID NO: 13685 - RNA, 96 nt, synthetic construct
  source 1..96: mol_type = other RNA
aaaaaaaaaaaaaaaaaaaaaaaaaaaataaaaaaaaaaaaaaaataaatatataaataaataaataaataaataaataaataaaaaaaaaaataa

SEQ ID NO: 13686 - RNA, 96 nt, synthetic construct
  source 1..96: mol_type = other RNA
aaaaaaaaaaaaaataaataaaaaaaaaaaaaaaaaaaaaaaaaaaaaaaaaaaatataaaaaaaataaataaaaaaaaaaaaaaaaaaaaatata

SEQ ID NO: 13687 - RNA, 96 nt, synthetic construct
  source 1..96: mol_type = other RNA
aaaaaaaaaaaaaataaatataaaaaaaaaaaaaaaaaaaaaaaaaaaaaaaaaataaaaaaaaaataaataaaaaaaaaaaaaaaaaaaaatata

SEQ ID NO: 13688 - RNA, 96 nt, synthetic construct
  source 1..96: mol_type = other RNA
aaaaaaaaaaaaaaaaaaaaaaaaaataaaaaataaataaaaaaaaaaaaaaaaaaaaaataaaaaaaaaaaaaaaaaaaaaaaaaaaaaaaataa

SEQ ID NO: 13689 - RNA, 96 nt, synthetic construct
  source 1..96: mol_type = other RNA
aaaaaaaaaaaaaaaaaaaaaataaataaaaaataaataaaaaaaaaaaaaaaaaaaaaataaaaaaaaaaaaaaaaaaaaaaaaaaaaaaaataa

SEQ ID NO: 13690 - RNA, 96 nt, synthetic construct
  source 1..96: mol_type = other RNA
aaaaaaaataaataaatataaataaataaataaaaaaaaaataaataaaaaaaaaaaaaaaaaaaaaaaaaaaaaaaaaaaaaatataaataaata

SEQ ID NO: 13691 - RNA, 96 nt, synthetic construct
  source 1..96: mol_type = other RNA
aaaaaaaaaaaaaataaatataaataaaaaaaaaaaaataaataaaaaaaaaaaaaaaaaaaaaaaaaaaaataaataaatataaataaatataaa

SEQ ID NO: 13692 - RNA, 96 nt, synthetic construct
  source 1..96: mol_type = other RNA
aaaaaaaaaaaaaaaaaaaaaatataaataaatataaataaaaaaaaaaaaaaaaaaaaaaaaaataaaaaaaataaatataaataaataaataaa

SEQ ID NO: 13693 - RNA, 96 nt, synthetic construct
  source 1..96: mol_type = other RNA
aaaaaaaaaaaaaataaatataaataaaaaaaaaaaaataaatataaaaaaaaaaaaaaaaaaaaaaaaataaataaataaataaataaatataaa

SEQ ID NO: 13694 - RNA, 96 nt, synthetic construct
  source 1..96: mol_type = other RNA
aaaaaaaaaaaaaataaatataaataaaaaaaaaaaaataaataaaaaaaaaaaaaaaaaaaaaaaaatataaataaataaataaataaatataaa

SEQ ID NO: 13695 - RNA, 96 nt, synthetic construct
  source 1..96: mol_type = other RNA
aaaaaaaaaataaataaatataaataaaaaaaaaaaaataaataaaaaaaaaaaaaaaaaaaaaaaaaaaaataaataaatataaataaatataaa

SEQ ID NO: 13696 - RNA, 96 nt, synthetic construct
  source 1..96: mol_type = other RNA
aaaaaaaaaaaaaataaatataaataaaaaaaaaaaaataaataaataaaaaaaaaaaaaaaaaaaaaaaaataaataaatataaataaatataaa

SEQ ID NO: 13697 - RNA, 96 nt, synthetic construct
  source 1..96: mol_type = other RNA
aaaaaaaaaaaaaaaaaaaaaatataaataaatataaataaaaaaaaaaaaaaaaaaaaaataaataaaaaaaataaatataaataaataaataaa

SEQ ID NO: 13698 - RNA, 96 nt, synthetic construct
  source 1..96: mol_type = other RNA
aaaaaaaaaaaaaataaatataaataaaaaaaaaaaaataaataaataaaaaaaaaaaaaaaaaaaaatataaataaataaataaataaatataaa

SEQ ID NO: 13699 - RNA, 96 nt, synthetic construct
  source 1..96: mol_type = other RNA
aaaaaaaaaataaataaatataaataaaaaaaaaaaaataaatataaaaaaaaaaaaaaaaaaaaaaaaataaataaataaataaataaatataaa

SEQ ID NO: 13700 - RNA, 96 nt, synthetic construct
  source 1..96: mol_type = other RNA
aaaaaaaaaataaataaatataaataaaaaaaaaaaaataaataaaaaaaaaaaaaaaaaaaaaaaaatataaataaataaataaataaatataaa

SEQ ID NO: 13701 - RNA, 96 nt, synthetic construct
  source 1..96: mol_type = other RNA
aaataaaaaaaaaaaaaaaaaaaataaataaatataaataaaaaaaaaaaaaaaaaaaaaaaaaataaaaaaaataaatataaataaataaataaa

SEQ ID NO: 13702 - RNA, 96 nt, synthetic construct
  source 1..96: mol_type = other RNA
aaaaaaaaaaaaaaaaatataaataaataaataaataaaaaaaaaaaaatataaatataaataaaaaaaaaaaaaaaaaaaaaaaaaaataaatat

SEQ ID NO: 13703 - RNA, 96 nt, synthetic construct
  source 1..96: mol_type = other RNA
aaaaaaaaaaaaaaaaaaaaaaaaaaaaaaaaaaaaaaaatataaatataaaaaaaaaaaataaataaataaatataaatataaataaatatataa

SEQ ID NO: 13704 - RNA, 96 nt, synthetic construct
  source 1..96: mol_type = other RNA
aaaaaaaaaaaaaaaaaaaaaaaaaaaaaaaaaaaaaaaatataaatataaataaaaaaaataaataaataaatataaatataaataaatatataa

SEQ ID NO: 13705 - RNA, 96 nt, synthetic construct
  source 1..96: mol_type = other RNA
aaaaaaaaaaaaaaaaaaaaaaaaaaaaatataaataaataaataaataaataaaaaaaaaaataaatataaataaaaaaaaataaataaatatat

SEQ ID NO: 13706 - RNA, 96 nt, synthetic construct
  source 1..96: mol_type = other RNA
aaaaaaaaaaaaaatataaataaataaataaaaaaaaaataaaaaaaaaaaaaaaaaaaaataaataaataaatataaataaataaataaatatat

SEQ ID NO: 13707 - RNA, 96 nt, synthetic construct
  source 1..96: mol_type = other RNA
aaaaaaaaaaaaaatataaataaataaataaaaaaaaaataaataaaaaaaaaaaaaaaaataaataaataaatataaataaataaataaatatat

SEQ ID NO: 13708 - RNA, 96 nt, synthetic construct
  source 1..96: mol_type = other RNA
aaaaaaaaaaaaaatataaataaataaataaataaaaaataaaaaaaaaaaaaaaaaaaaataaataaataaatataaataaataaataaatatat

SEQ ID NO: 13709 - RNA, 96 nt, synthetic construct
  source 1..96: mol_type = other RNA
aaaaaaaaaataaatataaataaataaataaaaaaaaaataaaaaaaaaaaaaaaaaaaaataaataaataaatataaataaataaataaatatat

SEQ ID NO: 13710 - RNA, 96 nt, synthetic construct
  source 1..96: mol_type = other RNA
aaaaaaaaaaaaaatataaataaataaataaataaaaaataaataaaaaaaaaaaaaaaaataaataaataaatataaataaataaataaatatat

SEQ ID NO: 13711 - RNA, 96 nt, synthetic construct
  source 1..96: mol_type = other RNA
aaaaaaaaaataaatataaataaataaataaaaaaaaaataaataaaaaaaaaaaaaaaaataaataaataaatataaataaataaataaatatat

SEQ ID NO: 13712 - RNA, 96 nt, synthetic construct
  source 1..96: mol_type = other RNA
aaaaaaaaaataaatataaataaataaataaataaaaaataaaaaaaaaaaaaaaaaaaaataaataaataaatataaataaataaataaatatat

SEQ ID NO: 13713 - RNA, 96 nt, synthetic construct
  source 1..96: mol_type = other RNA
aaaaaaaaaataaatataaataaataaataaataaaaaataaataaaaaaaaaaaaaaaaataaataaataaatataaataaataaataaatatat

SEQ ID NO: 13714 - RNA, 96 nt, synthetic construct
  source 1..96: mol_type = other RNA
aaaaaataaataaatataaataaataaataaaaaaaaaataaataaaaaaaaaaaaaaaaataaataaataaatataaataaataaataaatatat

SEQ ID NO: 13715 - RNA, 96 nt, synthetic construct
  source 1..96: mol_type = other RNA
aaaaaataaataaatataaataaataaataaataaaaaataaataaaaaaaaaaaaaaaaataaataaataaatataaataaataaataaatatat

SEQ ID NO: 13716 - RNA, 96 nt, synthetic construct
  source 1..96: mol_type = other RNA
aaaaaaaaaaaaaataaatataaaaaaaaaaaaaaaaataaataaaaaaaaaaaaaaaaataaaaaaaaaaaaataaataaataaataaatatata

SEQ ID NO: 13717 - RNA, 96 nt, synthetic construct
  source 1..96: mol_type = other RNA
aaaaaaaaaaaaaataaatataaataaaaaaaaaaaaataaataaaaaaaaaaaataaaaaaaaaaaaaaaaaataaataaataaataaatatata

SEQ ID NO: 13718 - RNA, 96 nt, synthetic construct
  source 1..96: mol_type = other RNA
aaaaaaaaaaaaaataaatataaataaaaaaaaaaaaataaataaaaaaaaaaaaaaaaaaaaaaaaataaaaataaataaataaataaatatata

SEQ ID NO: 13719 - RNA, 96 nt, synthetic construct
  source 1..96: mol_type = other RNA
aaaaaaaaaaaaaataaatataaataaaaaaaaaaaaataaataaaaaaaaaaaaaaaaaaaataaaaaaaaaataaataaataaataaatatata

SEQ ID NO: 13720 - RNA, 96 nt, synthetic construct
  source 1..96: mol_type = other RNA
aaaaaaaataaaaataaatataaataaaaaaaaaaaaataaataaaaaaaaaaaaaaaaaaaaaaaaaaaaaaataaataaataaataaatatata

SEQ ID NO: 13721 - RNA, 96 nt, synthetic construct
  source 1..96: mol_type = other RNA
aaaaaaaaaaaaaataaatataaataaaaaaaaaaaaataaataaaaaaaaaataaaaaaaaaaaaaaaaaaaataaataaataaataaatatata

SEQ ID NO: 13722 - RNA, 96 nt, synthetic construct
  source 1..96: mol_type = other RNA
aaaaaaaataaaaaaaaaaaaaaaaaaaaaaaaataaaaaaaaaaaaaataaataaataaataaaaaaaaaaaaaaaaataaatataaataaataa

SEQ ID NO: 13723 - RNA, 96 nt, synthetic construct
  source 1..96: mol_type = other RNA
aaaaaaaataaaaaaaaaaaaaaaaaaaaataaataaaaaaaaaaaaaataaataaataaataaaaaaaaaaaaaaaaataaatataaataaataa

SEQ ID NO: 13724 - RNA, 96 nt, synthetic construct
  source 1..96: mol_type = other RNA
aaatataaataaataaataaataaataaatataaaaataaaaaaaataaatataaaaaaaaaaaaaaaaaaaaaaaaataaatataaataaatata

SEQ ID NO: 13725 - RNA, 96 nt, synthetic construct
  source 1..96: mol_type = other RNA
aaaaaaaaaaaaaaaaaaaaaaaaaaaaaaaaaaaaaaaatataaatataaaaaaaaaaaataaataaataaatataaatataaataaatatatat

SEQ ID NO: 13726 - RNA, 96 nt, synthetic construct
  source 1..96: mol_type = other RNA
aaaatataaatataaataaaaaaaaaaaaaaaaaaaaaaaaaaaaataaataaaaaaaaaaaaaaaaaaaaaaaaaatataaataaataaatataa

SEQ ID NO: 13727 - RNA, 96 nt, synthetic construct
  source 1..96: mol_type = other RNA
aaatataaataaataaataaataaataaatataaaaataaaaaaaataaatataaaaaaaaaaaaaaaaaaaaataaataaatataaataaatata

SEQ ID NO: 13728 - RNA, 96 nt, synthetic construct
  source 1..96: mol_type = other RNA
aaaaaaaaaaaaaaaaaaaaaataaaaaataaaaaaaaaaaaaaaaaaaaaaaaaaaaaaaaaaaaaaaaaaaaataaaaaaaaaaaaaaaataat

SEQ ID NO: 13729 - RNA, 96 nt, synthetic construct
  source 1..96: mol_type = other RNA
aaaaaaaaaaaaaataaatataaataaaaaaaaaaaaataaataaaaaaaaaaaaaaaaaaaaaaaaaaatataaataaatataaataaatataaa

SEQ ID NO: 13730 - RNA, 96 nt, synthetic construct
  source 1..96: mol_type = other RNA
aaaaaaaaaaaaaataaatataaataaaaaaaaaaaaataaataaaaaaaaaaaaaaaaaaaaaaaaaaatataaatataaataaataaatataaa

SEQ ID NO: 13731 - RNA, 96 nt, synthetic construct
  source 1..96: mol_type = other RNA
aaaaaaaaaaaaaataaatataaataaaaaaaaaaaaataaataaaaaaaaaaaaaaaaaaaaaaaaaaataaatataaatataaataaatataaa

SEQ ID NO: 13732 - RNA, 96 nt, synthetic construct
  source 1..96: mol_type = other RNA
aaaaaaaaaaaaaataaatataaataaaaaaaaaaaaataaataaataaaaaaaaaaaaaaaaaaaaaaatataaataaatataaataaatataaa

SEQ ID NO: 13733 - RNA, 96 nt, synthetic construct
  source 1..96: mol_type = other RNA
aaaaaaaaaataaataaatataaataaaaaaaaaaaaataaataaaaaaaaaaaaaaaaaaaaaaaaaaatataaataaatataaataaatataaa

SEQ ID NO: 13734 - RNA, 96 nt, synthetic construct
  source 1..96: mol_type = other RNA
aaaaaaaaaaaaaataaatataaataaaaaaaaaaaaataaataaataaaaaaaaaaaaaaaaaaaaaaatataaatataaataaataaatataaa

SEQ ID NO: 13735 - RNA, 96 nt, synthetic construct
  source 1..96: mol_type = other RNA
aaaaaaaaaataaataaatataaataaaaaaaaaaaaataaataaataaaaaaaaaaaaaaaaaaaaaaatataaataaatataaataaatataaa

SEQ ID NO: 13736 - RNA, 96 nt, synthetic construct
  source 1..96: mol_type = other RNA
aaaaaaaaaaaaaataaataaaaaaaaaaaaaaaaaataaaaaaaaaaaaaaaaataaaaaaaaaataaataaaaaaaaaaaaaaaaaaaaatata

SEQ ID NO: 13737 - RNA, 96 nt, synthetic construct
  source 1..96: mol_type = other RNA
aaaaaaaaaaaaaataaataaaaaaaaaaaaaaaaaaaaaaaaaaaaaaaaaaaataaaaaaaaaataaataaaaaaataaaaaaaaaaaaatata

SEQ ID NO: 13738 - RNA, 96 nt, synthetic construct
  source 1..96: mol_type = other RNA
aaaaaaaaaaaaaataaataaaaaaaaaaaaaaaaaaaaaaaaaataaaaaaaaataaaaaaaaaataaataaaaaaaaaaaaaaaaaaaaatata

SEQ ID NO: 13739 - RNA, 96 nt, synthetic construct
  source 1..96: mol_type = other RNA
aaaaaaaaaaaaaataaataaaaaaaaaaaaaaaaaaaaaaaaaaaaaaaaaaaataaaaaaaaaataaataaaaaaaaaaaaaaaataaaatata

SEQ ID NO: 13740 - RNA, 96 nt, synthetic construct
  source 1..96: mol_type = other RNA
aaaaaaaaaaaaaataaataaaaaaaaaaaaataaaaaaaaaaaaaaaaaaaaaataaaaaaaaaataaataaaaaaaaaaaaaaaaaaaaatata

SEQ ID NO: 13741 - RNA, 96 nt, synthetic construct
  source 1..96: mol_type = other RNA
aaaaaaaaaataaataaataaaaaaaaaaaaaaaaaaaaataaaaaaaaaaaaaataaaaaaaaaataaataaaaaaaaaaaaaaaaaaaaatata

SEQ ID NO: 13742 - RNA, 96 nt, synthetic construct
  source 1..96: mol_type = other RNA
aaaaaaaaaataaataaataaaaaaaaaaaaaaaaataaaaaaaaaaaaaaaaaataaaaaaaaaataaataaaaaaaaaaaaaaaaaaaaatata

SEQ ID NO: 13743 - RNA, 96 nt, synthetic construct
  source 1..96: mol_type = other RNA
aaaaaaaaaataaataaataaaaaaaaaaaaaaaaaaaaaaataaaaaaaaaaaataaaaaaaaaataaataaaaaaaaaaaaaaaaaaaaatata

SEQ ID NO: 13744 - RNA, 96 nt, synthetic construct
  source 1..96: mol_type = other RNA
aaaaaaaaaataaataaataaaaaaaaaaaaaaaaataaaaaaaaaaaaaaaaaataaataaaaaataaataaaaaaaaaaaaaaaaaaaaatata

SEQ ID NO: 13745 - RNA, 96 nt, synthetic construct
  source 1..96: mol_type = other RNA
aaaaaaaaaataaataaataaataaaaaaaaaaaaaaaaataaaaaaaaaaaaaataaaaaaaaaataaataaaaaaaaaaaaaaaaaaaaatata

SEQ ID NO: 13746 - RNA, 96 nt, synthetic construct
  source 1..96: mol_type = other RNA
aaaaaaaaaataaataaataaaaaaaaaaaaaaaaataaataaaaaaaaaaaaaataaaaaaaaaataaataaaaaaaaaaaaaaaaaaaaatata

SEQ ID NO: 13747 - RNA, 96 nt, synthetic construct
  source 1..96: mol_type = other RNA
aaaaaaaaaataaataaataaataaaaaaaaaaaaataaaaaaaaaaaaaaaaaataaaaaaaaaataaataaaaaaaaaaaaaaaaaaaaatata

SEQ ID NO: 13748 - RNA, 96 nt, synthetic construct
  source 1..96: mol_type = other RNA
aaaaaaaaaataaataaataaaaaaaaaaaaaaaaaaaaataaaaaaaaaaaaaataaataaaaaataaataaaaaaaaaaaaaaaaaaaaatata

SEQ ID NO: 13749 - RNA, 96 nt, synthetic construct
  source 1..96: mol_type = other RNA
aaaaaaaaaataaataaataaataaaaaaaaaaaaaaaaaaaaaaaataaaaaaataaaaaaaaaataaataaaaaaaaaaaaaaaaaaaaatata

SEQ ID NO: 13750 - RNA, 96 nt, synthetic construct
  source 1..96: mol_type = other RNA
aaaaaaaaaataaataaataaaaaaaaaaaaaaaaaaaaataaaaaaaaaataaataaaaaaaaaataaataaaaaaaaaaaaaaaaaaaaatata

SEQ ID NO: 13751 - RNA, 96 nt, synthetic construct
  source 1..96: mol_type = other RNA
aaaaaaaaaataaataaataaaaaaaaaaaaaaaaaaaaataaaaaaaaaaaaaataaaaaaaaaataaataaaaaaaaaaaaaaaaataaatata

SEQ ID NO: 13752 - RNA, 96 nt, synthetic construct
  source 1..96: mol_type = other RNA
aaaaaaaaaataaataaataaataaaaaaaaaaaaataaataaaaaaaaaaaaaataaaaaaaaaataaataaaaaaaaaaaaaaaaaaaaatata

SEQ ID NO: 13753 - RNA, 96 nt, synthetic construct
  source 1..96: mol_type = other RNA
aaaaaaaaaataaataaataaataaaaaaaaaaaaaaaaataaaaaaaaaataaataaaaaaaaaataaataaaaaaaaaaaaaaaaaaaaatata

SEQ ID NO: 13754 - RNA, 96 nt, synthetic construct
  source 1..96: mol_type = other RNA
aaaaaaaaaataaataaataaataaaaaaaaaaaaaaaaataaaaaaaaaaaaaataaataaaaaataaataaaaaaaaaaaaaaaaaaaaatata

SEQ ID NO: 13755 - RNA, 96 nt, synthetic construct
  source 1..96: mol_type = other RNA
aaaaaaaaaataaataaataaataaaaaaaaaaaaataaaaaaaaaaaaaaaaaataaataaaaaataaataaaaaaaaaaaaaaaaaaaaatata

SEQ ID NO: 13756 - RNA, 96 nt, synthetic construct
  source 1..96: mol_type = other RNA
aaaaaaaaaataaataaataaataaaaaaaaaaaaaaaaataaaaaaaaaaaaaataaaaaataaataaataaaaaaaaaaaaaaaaaaaaatata

SEQ ID NO: 13757 - RNA, 96 nt, synthetic construct
  source 1..96: mol_type = other RNA
aaaaaaaaaataaataaataaaaaaaaaaaaaaaaataaataaaaaaaaaaaaaataaataaaaaataaataaaaaaaaaaaaaaaaaaaaatata

SEQ ID NO: 13758 - RNA, 96 nt, synthetic construct
  source 1..96: mol_type = other RNA
aaaaaaaaaataaataaataaataaaaaaaaaaaaaaaaataaaaaaaaaaaaaataaaaaaaaaataaataaaaaaaaaaaaaaaaataaatata

SEQ ID NO: 13759 - RNA, 96 nt, synthetic construct
  source 1..96: mol_type = other RNA
aaaaaaaaaataaataaataaataaaaaaaaaaaaataaaaaaaaaaaaaataaataaaaaaaaaataaataaaaaaaaaaaaaaaaaaaaatata

SEQ ID NO: 13760 - RNA, 97 nt, synthetic construct
  source 1..97: mol_type = other RNA
aaaaaaaaaaaaaaaaaaaaaaaaaaataaatataaaaaaaaaaaaaaaaaaaaaaaaaaaataaataaaaaaaaaaaaaaaaaaaaaaaaaaatat

SEQ ID NO: 13761 - RNA, 97 nt, synthetic construct
  source 1..97: mol_type = other RNA
aaaaaaaaaaaaaaaaaaaaaaaaaaatataaataaaaaaaaaaaaaaaaaaaaaaaaaaaaaaaatataaaaaaaaaaaaaaaaaaaaaaaaatat

SEQ ID NO: 13762 - RNA, 97 nt, synthetic construct
  source 1..97: mol_type = other RNA
aaaaaaaaaaaaaaaaaaaaaaaaaaataaatataaaaaaaaaaaaaaaaaaaaaaaaaaaataaatataaaaaaaaaaaaaaaaaaaaaaaaatat

SEQ ID NO: 13763 - RNA, 97 nt, synthetic construct
  source 1..97: mol_type = other RNA
aaaaaaaaaaaaaaaaaaaaaaaaaaatataaataaaaaaaaaaaaaaaaaaaaaaaaaaaataaatataaaaaaaaaaaaaaaaaaaaaaaaatat

SEQ ID NO: 13764 - RNA, 97 nt, synthetic construct
  source 1..97: mol_type = other RNA
aaaaaaaaaaaaaaaaaaaaaaaaaaatataaataaataaaaaaaaaaaaaaaaaaaaaaaataaatataaaaaaaaaaaaaaaaaaaaaaaaatat

SEQ ID NO: 13765 - RNA, 97 nt, synthetic construct
  source 1..97: mol_type = other RNA
aaaaaaaaaaaaaaaaaaaaaaataaatataaataaaaaaaaaaaaaaaaaaaaaaaaaaaataaatataaaaaaaaaaaaaaaaaaaaaaaaatat

SEQ ID NO: 13766 - RNA, 97 nt, synthetic construct
  source 1..97: mol_type = other RNA
aaatataaaaaaaaaataaataaataaataaatataaatataaataaataaataaatataaataaataaataaataaataaaaaaaaaaaaaaataa

SEQ ID NO: 13767 - RNA, 97 nt, synthetic construct
  source 1..97: mol_type = other RNA
aaaataaataaaaaaaataaataaataaataaataaataaaaaaaaaaaaaaaaaaataaataaataaaaaaaaaaaaaaaaaaaaaaaaaaaataa

SEQ ID NO: 13768 - RNA, 97 nt, synthetic construct
  source 1..97: mol_type = other RNA
aaaataaataaaaaaaataaataaataaataaataaataaaaaaaaaaaaaaaaaaataaataaataaaaaaaaaaaaaaaaaaaaaaaataaataa

SEQ ID NO: 13769 - RNA, 97 nt, synthetic construct
  source 1..97: mol_type = other RNA
aaaaaaaaaaaaaaaaaaaaaaaaaaataaaaaaaataaataaataaaaaaaaaaaaaataaaaaaaaaaaaaaaaaaaaaaaaaaaaaataaatat

SEQ ID NO: 13770 - RNA, 97 nt, synthetic construct
  source 1..97: mol_type = other RNA
aaaaaaaaaaaaaaaaaaaaaaaaatataaatataaaaaaaaaaaaaaaaaaaaaaaaaaaataaatataaaaaaaaaaaaaaaaaaaaaaaaatat

SEQ ID NO: 13771 - RNA, 97 nt, synthetic construct
  source 1..97: mol_type = other RNA
aaaataaataaaaaaaataaataaataaataaataaataaaaaaaaaaaaaaaaaaataaataaataaaaaaaaaaaaaaaaaaaaaaaataaatat

SEQ ID NO: 13772 - RNA, 97 nt, synthetic construct
  source 1..97: mol_type = other RNA
aaaaaaaaaaaaaaaaaaaaaaaaaaataaatataaaaaaaaaaaaaaaaaaaaaaaaaaaataaatatataaaaaaaaaaaaaaaaaaaaaaatat

SEQ ID NO: 13773 - RNA, 97 nt, synthetic construct
  source 1..97: mol_type = other RNA
aaaaaaaaaaaaaaaaaaaaaaaaaaatataaataaaaaaaaaaaaaaaaaaaaaaaaaaaataaatatataaaaaaaaaaaaaaaaaaaaaaatat

SEQ ID NO: 13774 - RNA, 97 nt, synthetic construct
  source 1..97: mol_type = other RNA
aaaaaaaaaaaaaaaaaaaaaaaaaaatataaataaaaaaaaaaaaaaaaaaaaaaaaaaaataaatataaaaaaaaaaaaaaaaaaaaaaatatat

SEQ ID NO: 13775 - RNA, 97 nt, synthetic construct
  source 1..97: mol_type = other RNA
aaaaaaaaaaaaaaaaaaataaaaaaaaaaaaaaaaaaaaaaaaaaaaataaatataaaaaaaaatataaataaataaaaaaaaaaaaaaaaatata

SEQ ID NO: 13776 - RNA, 97 nt, synthetic construct
  source 1..97: mol_type = other RNA
aaaaaaaaaaaaaaataaataaaaaaaaaaaaaaaaaaaaaaaaaaaaataaatataaaaaaaaatataaataaataaaaaaaaaaaaaaaaatata

SEQ ID NO: 13777 - RNA, 97 nt, synthetic construct
  source 1..97: mol_type = other RNA
aaatatataaaaaaaataaataaataaataaatataaatataaataaataaataaatataaataaataaataaataaataaaaaaaaaaaaaaataa

SEQ ID NO: 13778 - RNA, 97 nt, synthetic construct
  source 1..97: mol_type = other RNA
aaaaaaaaaaaaaaaaaaaaaataaataaataaataaaaaataaatataaataaataaataaaaaaaaaaaaaaaataaaaaataaataaatatata

SEQ ID NO: 13779 - RNA, 97 nt, synthetic construct
  source 1..97: mol_type = other RNA
aaatatataaaataaataaataaataaataaatataaatataaataaataaataaatataaataaataaataaataaataaaaaaaaaaaaaaataa

SEQ ID NO: 13780 - RNA, 97 nt, synthetic construct
  source 1..97: mol_type = other RNA
aaatatataaaaaaaataaataaataaataaatataaatataaataaataaataaatataaataaataaataaataaataaaaaaaaaaataaataa

SEQ ID NO: 13781 - RNA, 97 nt, synthetic construct
  source 1..97: mol_type = other RNA
aaaaaaaaaaaaaaaaaaaaaaaaaaataaaaataaaaaaaaaaaaaaaaaaaaaaaaaaaataaatataaaaaaaaaaaaaaaaaaaaaaaaatat

SEQ ID NO: 13782 - RNA, 97 nt, synthetic construct
  source 1..97: mol_type = other RNA
aaaaaaaaaaaaaaaaaaaaaaaaaaatataaataaaaaaaaaaaaaaaaaaaaaaaaaaaataaaaataaaaaaaaaaaaaaaaaaaaaaaaatat

SEQ ID NO: 13783 - RNA, 97 nt, synthetic construct
  source 1..97: mol_type = other RNA
aaaaaaaaaaaaaaaaaaaaaaaaaaataaaaaaaataaataaatataaaaaaaaaaaataaaaaaaaaaaaaaaaaaaaaaaaaaaaaataaatat

SEQ ID NO: 13784 - RNA, 97 nt, synthetic construct
  source 1..97: mol_type = other RNA
aaatatataaaaaaaataaataaataaataaatataaatataaataaataaataaatataaataaataaataaataaataaaaaaaaaaaaaaatat

SEQ ID NO: 13785 - RNA, 97 nt, synthetic construct
  source 1..97: mol_type = other RNA
aaaaatataaaaaaaataaataaataaataaatataaatataaataaataaataaatataaataaataaataaataaataaaaaaaaaaaaaaataa

SEQ ID NO: 13786 - RNA, 97 nt, synthetic construct
  source 1..97: mol_type = other RNA
aaaaaaaaaaaataaaaaaaaaaaaaaaaaaaaaaaaataaataaaaaaaaaaaaaataaataaaaaaaaaataaaaaaaaaaaaaaaataaatata

SEQ ID NO: 13787 - RNA, 97 nt, synthetic construct
  source 1..97: mol_type = other RNA
aaaaatataaataaaataaataaataaataaatataaatataaataaataaataaatataaataaataaataaataaataaaaaaaaaaaaaaataa

SEQ ID NO: 13788 - RNA, 97 nt, synthetic construct
  source 1..97: mol_type = other RNA
aaaaaaaaaaaataaaaaaaaaaaaaaaaaaaaaaaaataaataaaaaaaaaataaataaataaaaaaaaaataaaaaaaaaaaaaaaataaatata

SEQ ID NO: 13789 - RNA, 97 nt, synthetic construct
  source 1..97: mol_type = other RNA
aaaaaaaaaaaataaaaaaaaaaaaaaaaaaaaataaataaataaaaaaaaaataaataaataaaaaaaaaataaaaaaaaaaaaaaaataaatata

SEQ ID NO: 13790 - RNA, 97 nt, synthetic construct
  source 1..97: mol_type = other RNA
aaaaaaaaaaaataaataaaaaaaaaaaaaaaaaaaaataaataaaaaaaaaataaataaataaaaaaaaaataaaaaaaaaaaaaaaataaatata

SEQ ID NO: 13791 - RNA, 97 nt, synthetic construct
  source 1..97: mol_type = other RNA
aaaaaaaaaaaaaaaaatataaaaaaaaaaaaaaaaaaaaaaaaaaaaataaatataaaaaaaaatataaataaataaaaaaaaaaaaaaaaatata

SEQ ID NO: 13792 - RNA, 97 nt, synthetic construct
  source 1..97: mol_type = other RNA
aaaaaaaaaaaaaaaaatataaaaaaaaaaaaaaaaaaaaaaaaataaataaatataaaaaaaaatataaataaataaaaaaaaaaaaaaaaatata

SEQ ID NO: 13793 - RNA, 97 nt, synthetic construct
  source 1..97: mol_type = other RNA
aaaaaaaaaaaaaaaaaaaaaataaataaataaataaaaaataaatataaataaataaataaaaaaaaaaaaaaaataaataataaataaatatata

SEQ ID NO: 13794 - RNA, 97 nt, synthetic construct
  source 1..97: mol_type = other RNA
aaaaaaaaaaaaaaaaaaaaaaaaaaatatatataaaaaaaaaaaaaaaaaaaaaaaaaaaataaatataaaaaaaaaaaaaaaaaaaaaaaaatat

SEQ ID NO: 13795 - RNA, 97 nt, synthetic construct
  source 1..97: mol_type = other RNA
aaaaaaaaaaaaaaaaaaaaaaaaaaatataaataaaaaaaaaaaaaaaaaaaaaaaaaaaatatatataaaaaaaaaaaaaaaaaaaaaaaaatat

SEQ ID NO: 13796 - RNA, 97 nt, synthetic construct
  source 1..97: mol_type = other RNA
aaaaaaaaaaaaaaaaaaaataaataaaaaaaatataaaaaaaaaaaaaaaaaaaaaaaaaaaataaataaataaatataaaaaaaaaaaaaaataa

SEQ ID NO: 13797 - RNA, 97 nt, synthetic construct
  source 1..97: mol_type = other RNA
aaaaaaaaaaaaaaaaaaaataaataaataaaatataaaaaaaaaaaaaaaaaaaaaaaaaaaataaataaataaatataaaaaaaaaaaaaaataa

SEQ ID NO: 13798 - RNA, 97 nt, synthetic construct
  source 1..97: mol_type = other RNA
aaaataaaaaaaaaaaaaaaaaaaaaataaataataaatataaatataaataaataaataaataaataaatataaataaataaatataaataaataa

SEQ ID NO: 13799 - RNA, 97 nt, synthetic construct
  source 1..97: mol_type = other RNA
aaaaaaaaaaaaaaaaaaaaaaaaaaatataaataaaaaaaaaaataaaaaaaaaaaaaaaaaaaatataaaaaaaaaaaaaaaaaaaaaaaaatat

SEQ ID NO: 13800 - RNA, 97 nt, synthetic construct
  source 1..97: mol_type = other RNA
aaaaaaaaaaaaaaaaaaaaaaaaaaatataaataaaaaaaaaaaaaaaaaaataaaaaaaaaaaatataaaaaaaaaaaaaaaaaaaaaaaaatat

SEQ ID NO: 13801 - RNA, 97 nt, synthetic construct
  source 1..97: mol_type = other RNA
aaaaaaaaaaaaaaaaaaaaaaaaaaatataaataaaaaaaaaaaaaaaaaaaaaaataaaaaaaatataaaaaaaaaaaaaaaaaaaaaaaaatat

SEQ ID NO: 13802 - RNA, 97 nt, synthetic construct
  source 1..97: mol_type = other RNA
aaaaaaaaaaataaaaaaaaaaaaaaataaatataaaaaaaaaaaaaaaaaaaaaaaaaaaataaatataaaaaaaaaaaaaaaaaaaaaaaaatat

SEQ ID NO: 13803 - RNA, 97 nt, synthetic construct
  source 1..97: mol_type = other RNA
aaaaaaaaaaaaataaaaaaaaaaaaataaatataaaaaaaaaaaaaaaaaaaaaaaaaaaataaatataaaaaaaaaaaaaaaaaaaaaaaaatat

SEQ ID NO: 13804 - RNA, 97 nt, synthetic construct
  source 1..97: mol_type = other RNA
aaaaaaaaaaaaataaaaaaaaaaaaatataaataaaaaaaaaaaaaaaaaaaaaaaaaaaataaatataaaaaaaaaaaaaaaaaaaaaaaaatat

SEQ ID NO: 13805 - RNA, 97 nt, synthetic construct
  source 1..97: mol_type = other RNA
aaaaaaaaaaaaaaaaaaaaaaaaaaataaatataaaaaaaaaaaaataaaaaaaaaaaaaataaatataaaaaaaaaaaaaaaaaaaaaaaaatat

SEQ ID NO: 13806 - RNA, 97 nt, synthetic construct
  source 1..97: mol_type = other RNA
aaaaaaaaataaaaaaaaaaaaaaaaatataaataaaaaaaaaaaaaaaaaaaaaaaaaaaataaatataaaaaaaaaaaaaaaaaaaaaaaaatat

SEQ ID NO: 13807 - RNA, 97 nt, synthetic construct
  source 1..97: mol_type = other RNA
aaaaaaaaaaaaaaaaaaaaaaaaaaatataaataaaaaaaaaaaaataaaaaaaaaaaaaataaatataaaaaaaaaaaaaaaaaaaaaaaaatat

SEQ ID NO: 13808 - RNA, 97 nt, synthetic construct
  source 1..97: mol_type = other RNA
aaaaaaaaaaataaaaaaaaaaaaaaatataaataaaaaaaaaaaaaaaaaaaaaaaaaaaataaatataaaaaaaaaaaaaaaaaaaaaaaaatat

SEQ ID NO: 13809 - RNA, 97 nt, synthetic construct
  source 1..97: mol_type = other RNA
aaaaaaaaataaaaaaaaaaaaaaaaataaatataaaaaaaaaaaaaaaaaaaaaaaaaaaataaatataaaaaaaaaaaaaaaaaaaaaaaaatat

SEQ ID NO: 13810 - RNA, 97 nt, synthetic construct
  source 1..97: mol_type = other RNA
aaaaaaaaaaaaaaaaaaaaaaaaaaataaatataaaaaaaaaaaaaaaaaaaaaaaaaaaataaatataaaaaaaaaaaaaaaaaaaataaaatat

SEQ ID NO: 13811 - RNA, 97 nt, synthetic construct
  source 1..97: mol_type = other RNA
aaaaaaataaaaaaaaaaaaaaaaaaataaatataaaaaaaaaaaaaaaaaaaaaaaaaaaataaatataaaaaaaaaaaaaaaaaaaaaaaaatat

SEQ ID NO: 13812 - RNA, 97 nt, synthetic construct
  source 1..97: mol_type = other RNA
aaaaaaaaaaaaaaaaaaaaaaaaaaatataaataaaaaaaaaaaaaaaaaaaaaaaaaaaataaatataaaaaaaaaaaaataaaaaaaaaaatat

SEQ ID NO: 13813 - RNA, 97 nt, synthetic construct
  source 1..97: mol_type = other RNA
aaaaaaaaaaaaaaaaaaaaaaaaaaataaatataaaaataaaaaaaaaaaaaaaaaaaaaataaatataaaaaaaaaaaaaaaaaaaaaaaaatat

SEQ ID NO: 13814 - RNA, 97 nt, synthetic construct
  source 1..97: mol_type = other RNA
aaaaaaaaaaaaaaaaaaaaaaaaaaatataaataaaaaaaaaaaaaaaaaaaaaaaaaaaataaatataaaataaaaaaaaaaaaaaaaaaaatat

SEQ ID NO: 13815 - RNA, 97 nt, synthetic construct
  source 1..97: mol_type = other RNA
aaaaaaaaaaaaaaaaaaaaaaaaaaatataaataaaaaaaaaaaaaaaaaaaaaaaaaaaataaatataaaaataaaaaaaaaaaaaaaaaaatat

SEQ ID NO: 13816 - RNA, 97 nt, synthetic construct
  source 1..97: mol_type = other RNA
aaaaaaaaaaaaaaaaaaaaaaaaaaatataaataaaaaataaaaaaaaaaaaaaaaaaaaataaatataaaaaaaaaaaaaaaaaaaaaaaaatat

SEQ ID NO: 13817 - RNA, 97 nt, synthetic construct
  source 1..97: mol_type = other RNA
aaaaaaaaaaaaaaaaaaaaaaaaaaatataaataaaaaaaaaaaaaaaaaaaaaaaaaaaataaatataaaaaaaaaataaaaaaaaaaaaaatat

SEQ ID NO: 13818 - RNA, 97 nt, synthetic construct
  source 1..97: mol_type = other RNA
aaaaaaaaaaaaaaaaaaaaaaaaaaatataaataaaaaaaaaaaaaaaaaaaaaaaaaaaataaatataaaaaaaaaaaaaaataaaaaaaaatat

SEQ ID NO: 13819 - RNA, 97 nt, synthetic construct
  source 1..97: mol_type = other RNA
aaaaaaaaaaaaaaaaaaaaaaaaaaatataaataaaaaaaaaataaaaaaaaaaaaaaaaataaatataaaaaaaaaaaaaaaaaaaaaaaaatat

SEQ ID NO: 13820 - RNA, 97 nt, synthetic construct
  source 1..97: mol_type = other RNA
aaaaaaaaaaaaaaaaaaaaaaaaaaatataaataaaaaaaaaaaaaaataaaaaaaaaaaataaatataaaaaaaaaaaaaaaaaaaaaaaaatat

SEQ ID NO: 13821 - RNA, 97 nt, synthetic construct
  source 1..97: mol_type = other RNA
aaaaaaataaataaaaaaaaaaaaaaataaatataaaaaaaaaaaaaaaaaaaaaaaaaaaataaatataaaaaaaaaaaaaaaaaaaaaaaaatat

SEQ ID NO: 13822 - RNA, 97 nt, synthetic construct
  source 1..97: mol_type = other RNA
aaaaaaataaataaaaaaaaaaaaaaatataaataaaaaaaaaaaaaaaaaaaaaaaaaaaataaatataaaaaaaaaaaaaaaaaaaaaaaaatat

SEQ ID NO: 13823 - RNA, 97 nt, synthetic construct
  source 1..97: mol_type = other RNA
aaaaaaaaaaataaaaaaaaaaaaaaataaatataaaaaaaaaaaaaaaaaaaaaaaaaaaataaatataaataaaaaaaaaaaaaaaaaaaaatat

SEQ ID NO: 13824 - RNA, 97 nt, synthetic construct
  source 1..97: mol_type = other RNA
aaaaaaaaataaaaaaaaaaaaaaaaataaatataaaaaaaaaaaaaaaaaaaaaaaaaaaataaatataaataaaaaaaaaaaaaaaaaaaaatat

SEQ ID NO: 13825 - RNA, 97 nt, synthetic construct
  source 1..97: mol_type = other RNA
aaaaaaataaataaaaaaaaaaaaaaataaatataaaaaaaaaaaaaaaaaaaaaaaaaaaataaatataaataaaaaaaaaaaaaaaaaaaaatat

SEQ ID NO: 13826 - RNA, 97 nt, synthetic construct
  source 1..97: mol_type = other RNA
aaaaaaaaaaaaaaaaaaaataaataaaaaaaatataaaaaaaaaaaaaaaaaaaaaaaaaaaataaataaataaatataaaaaaaaaaaaaaatat

SEQ ID NO: 13827 - RNA, 97 nt, synthetic construct
  source 1..97: mol_type = other RNA
aaaaaaaaaaaaaaaaaaaaaaaaaaatataaataaaaaaaaaaaaaaaaaaaaaaaaaaaaaaaatataaaaaaaaaaaaaaaaaaaaaaaaatac

SEQ ID NO: 13828 - RNA, 97 nt, synthetic construct
  source 1..97: mol_type = other RNA
aaaaaaaaaaaaaaaaaaaaaaaaaaatataaataaaaaaaaaaaaaaaaaaaaaaaaaaaataaatataaaaaaaaaaaaaaaaaaaaaaaaatac

SEQ ID NO: 13829 - RNA, 97 nt, synthetic construct
  source 1..97: mol_type = other RNA
aaaaaaaaaaaaaaaaaaaaaaaaaaataaatataaaaaaaaaaaaaaaaaaaaaaaaaaaataaatataaaaaaaaaaaaaaaaaaaaaaaaatac

SEQ ID NO: 13830 - RNA, 97 nt, synthetic construct
  source 1..97: mol_type = other RNA
aaaaaaaaaaaataaataaataaatataaataaaaaaaataaaaaaaaaaaaaaaaaataaatataaatataaataaataaatataaatataaataa

SEQ ID NO: 13831 - RNA, 97 nt, synthetic construct
  source 1..97: mol_type = other RNA
aaaaaaaaaaaataaataaataaatataaataaaaaaaataaataaaaaaaaaaaaaataaatataaatataaataaataaatataaatataaataa

SEQ ID NO: 13832 - RNA, 97 nt, synthetic construct
  source 1..97: mol_type = other RNA
aaaaaaaaaaaaaaaaaaaaaaaaaaataaaaataaaaaaaaaaaaaaaaaaaaaaaaaaaataaatatataaaaaaaaaaaaaaaaaaaaaaatat

SEQ ID NO: 13833 - RNA, 97 nt, synthetic construct
  source 1..97: mol_type = other RNA
aaaaaaaaaaaaaaaaaaataaaaaaaaaaaaaaaaaaaaaaaaaaaaataaaaataaaaaaaaatataaataaataaaaaaaaaaaaaaaaatata

SEQ ID NO: 13834 - RNA, 97 nt, synthetic construct
  source 1..97: mol_type = other RNA
aaaaaaaaaaaaaaaaaaaaaaaaaaaaaaaaatataaaatatataaataaataaatataaatataaaaaaaaaaaaaaaaaaaaaaaaataaataa

SEQ ID NO: 13835 - RNA, 97 nt, synthetic construct
  source 1..97: mol_type = other RNA
aaaaatataaaaaatataaataaataaataaatataaatataaataaataaataaatataaataaataaataaataaataaaaaaaaaaaaaaataa

SEQ ID NO: 13836 - RNA, 97 nt, synthetic construct
  source 1..97: mol_type = other RNA
aaaatataaaaaaatataaataaataaataaatataaatataaataaataaataaatataaataaataaataaataaataaaaaaaaaaaaaaataa

SEQ ID NO: 13837 - RNA, 97 nt, synthetic construct
  source 1..97: mol_type = other RNA
aaaaaatataaaaatataaataaataaataaatataaatataaataaataaataaatataaataaataaataaataaataaaaaaaaaaaaaaataa

SEQ ID NO: 13838 - RNA, 97 nt, synthetic construct
  source 1..97: mol_type = other RNA
aaaaaaaaaaaaaaaaaaaaaaaaaaaaaaaaatataaaatatataaataaataaatataaatataaaaaaaaaaaaaaaaaaaaataaataaataa

SEQ ID NO: 13839 - RNA, 97 nt, synthetic construct
  source 1..97: mol_type = other RNA
aaaaaaaaaaaataaaaaaaaaaaaaaaaaaaaaaaaataaataaaaaaaatataaataaataaaaaaaaaataaaaaaaaaaaaaaaataaatata

SEQ ID NO: 13840 - RNA, 97 nt, synthetic construct
  source 1..97: mol_type = other RNA
aaaaaaaaaaaataaaaaaaaaaaaaaaaaaaaaaaaataaataaaaaaaaaataaataaataaaaaaaaaataaaaaaaaaaaaaatataaatata

SEQ ID NO: 13841 - RNA, 97 nt, synthetic construct
  source 1..97: mol_type = other RNA
aaataaaaaaaaaaaaaaaaaaaaaaaataaaaaaaaaaaaaaaaaaaaaaaaaaaaaaaaaataaataaataaaaaaaaaaaaaatataaataaat

SEQ ID NO: 13842 - RNA, 97 nt, synthetic construct
  source 1..97: mol_type = other RNA
aaataaaaaaaaaaaaaaaaaaaataaataaaaaaaaaaaaaaaaaaaaaaaaaaaaaaaaaataaataaataaaaaaaaaaaaaatataaataaat

SEQ ID NO: 13843 - RNA, 97 nt, synthetic construct
  source 1..97: mol_type = other RNA
aaataaaaaaaaaaaaaaaaaaaataaataaaaaaaaaaaaaaaaaaaaaaaaaaaaaaaaaataaataaataaataaaaaaaaaatataaataaat

SEQ ID NO: 13844 - RNA, 97 nt, synthetic construct
  source 1..97: mol_type = other RNA
aaataaaaaaaaaaaaaaaaaaaataaataaataaaaaaaaaaaaaaaaaaaaaaaaaaaaaataaataaataaataaaaaaaaaatataaataaat

SEQ ID NO: 13845 - RNA, 97 nt, synthetic construct
  source 1..97: mol_type = other RNA
aaataaaaaaaaaaaaaaaataaataaataaaaaaaaaaaaaaaaaaaaaaaaaaaaaaaaaataaataaataaataaaaaaaaaatataaataaat

SEQ ID NO: 13846 - RNA, 97 nt, synthetic construct
  source 1..97: mol_type = other RNA
aaataaaaaaaaaaaaaaaaaaaataaataaaaaaaaaaaaaaaaaaaaaaaaaaaaaaaaaataaataaataaataaataaaaaatataaataaat

SEQ ID NO: 13847 - RNA, 97 nt, synthetic construct
  source 1..97: mol_type = other RNA
aaaaaaaaaaaataaataaataaatataaataaaaaaaataaaaaaaaaaaaaaaaaataaatataaatataaataaataaatataaatataaatat

SEQ ID NO: 13848 - RNA, 97 nt, synthetic construct
  source 1..97: mol_type = other RNA
aaataaaaaaaaaaaaaaaataaataaataaataaaaaaaaaaaaaaaaaaaaaaaaaaaaaataaataaataaataaaaaaaaaatataaataaat

SEQ ID NO: 13849 - RNA, 97 nt, synthetic construct
  source 1..97: mol_type = other RNA
aaataaaaaaaaaaaaaaaaaaaataaataaataaaaaaaaaaaaaaaaaaaaaaaaaaaaaataaataaataaataaataaaaaatataaataaat

SEQ ID NO: 13850 - RNA, 97 nt, synthetic construct
  source 1..97: mol_type = other RNA
aaataaaaaaaaaaaaaaaataaataaataaaaaaaaaaaaaaaaaaaaaaaaaaaaaaaaaataaataaataaataaataaaaaatataaataaat

SEQ ID NO: 13851 - RNA, 97 nt, synthetic construct
  source 1..97: mol_type = other RNA
aaataaaaaaaaaaaaaaaataaataaataaataaaaaaaaaaaaaaaaaaaaaaaaaaaaaataaataaataaataaataaaaaatataaataaat

SEQ ID NO: 13852 - RNA, 97 nt, synthetic construct
  source 1..97: mol_type = other RNA
aaaaatataaaaaatataaataaataaataaatataaatataaataaataaataaatataaataaataaataaataaataaaaaaaaaaaaaaatat

SEQ ID NO: 13853 - RNA, 97 nt, synthetic construct
  source 1..97: mol_type = other RNA
aaatatataaataaataaataaaaaaaaaaaaaaaaaaaaatataaatataaataaaaaaaaaaaaataaataaaaaaaaaaaaataaataaataaa

SEQ ID NO: 13854 - RNA, 97 nt, synthetic construct
  source 1..97: mol_type = other RNA
aaatatataaataaataaataaaaaaaaaaaaaaaaataaatataaatataaataaaaaaaaaaaaataaataaaaaaaaaaaaaaaaataaataaa

SEQ ID NO: 13855 - RNA, 97 nt, synthetic construct
  source 1..97: mol_type = other RNA
aaaaaaaaaaaaaaaaaaaaaaaaataaataaaaaaaaaataaaaaaaaaataaataaataaataaaaaaaataaaaaaaaaaaaaaaaaaaaataa

SEQ ID NO: 13856 - RNA, 97 nt, synthetic construct
  source 1..97: mol_type = other RNA
aaatatataaataaataaataaaaaaaaaaaaaaaaataaatataaatataaataaaaaaaaaaaaataaataaaaaaaaaaaaataaataaataaa

SEQ ID NO: 13857 - RNA, 97 nt, synthetic construct
  source 1..97: mol_type = other RNA
aaaaaaaaaaaaaaaaaaaaaaaaataaataaaaaataaataaaaaaaaaataaataaataaataaaaaaaataaaaaaaaaaaaaaaaaaaaataa

SEQ ID NO: 13858 - RNA, 97 nt, synthetic construct
  source 1..97: mol_type = other RNA
aaaaaaaaaaaaaaaaaaaaaaaaataaataaaaaaaaaataaaaaaaaaataaataaataaataaaaaaaataaaaaaaaaaaaaaaaataaataa

SEQ ID NO: 13859 - RNA, 97 nt, synthetic construct
  source 1..97: mol_type = other RNA
aaaaaaaaaaaaaaaaaaaaaaaaataaataaaaaaaaaataaaaaaaaaataaataaataaataaaataaataaaaaaaaaaaaaaaaaaaaataa

SEQ ID NO: 13860 - RNA, 98 nt, synthetic construct
  source 1..98: mol_type = other RNA
aaaaaaaaaaaaaaaaaaaaaaaaaaaaaaaataaataaataaataaataaatataaaaaaaaataaaaaaaaaaaaaaaaaaaaaaaaaaaaaataa

SEQ ID NO: 13861 - RNA, 98 nt, synthetic construct
  source 1..98: mol_type = other RNA
aaaaaaaaataaaaaaaaaaaaaaaaaaaaaaaaaaaaaaaaaaaaaaaaaaaaaaaaaaaaaaaaataaatataaaaaaaaaatataaataaataaa

SEQ ID NO: 13862 - RNA, 98 nt, synthetic construct
  source 1..98: mol_type = other RNA
aaataaaaaaaaaaaaaaaaaaaaaaaaaaaaaaaaaaaaataaataaaaaaaaaaaaaaaaaaaaaaaaaaaatataaataaatataaatataaata

SEQ ID NO: 13863 - RNA, 98 nt, synthetic construct
  source 1..98: mol_type = other RNA
aaataaaaaaaaaaaaaaaaaaaaaaaaaaaataaataaataaataaataaatataaaaaaaaataaaaaaaaaaaaaaaaaaaaaaaaaaaaaataa

SEQ ID NO: 13864 - RNA, 98 nt, synthetic construct
  source 1..98: mol_type = other RNA
aaaaaaaaaaaaataaataaataaatataaatataaataaatatataaatataaataaaaaaaaaaaaaaaataaataaatataaataaataaatata

SEQ ID NO: 13865 - RNA, 98 nt, synthetic construct
  source 1..98: mol_type = other RNA
aaaaaaaaaaaaataaataaataaatataaatataaataaatatataaatataaataaaaaaaaaaaataaataaataaatataaataaataaatata

SEQ ID NO: 13866 - RNA, 98 nt, synthetic construct
  source 1..98: mol_type = other RNA
aaatataaataaaaaaaaaaaaaaaaaaataaaaaaaaaaaaaaaaaaaaaaaaaaaaaatataaataaataaataaataaaaaaaaaaaaatatata

SEQ ID NO: 13867 - RNA, 98 nt, synthetic construct
  source 1..98: mol_type = other RNA
aaataaataaaaaaaaaaaaaaaaaaaaaaaaaaataaataaatatataaataaataaataaaaaaaaaaaaaaaaaaaaataaaaaaaaaatatata

SEQ ID NO: 13868 - RNA, 98 nt, synthetic construct
  source 1..98: mol_type = other RNA
aaaaaaaaaaaaaaaaaaaaaaaaaaaaaaaaaaaaaaaaaaaaaataaataaaaaaaaaaaaaataaataaataaataaatataaatataaataata

SEQ ID NO: 13869 - RNA, 98 nt, synthetic construct
  source 1..98: mol_type = other RNA
aaataaataaaaaaaaaaaaaaaaaaaaaaaaaaataaataaatatataaataaataaataaaaaaaaaaaaaaaaaaaaataaataaaaaatatata

SEQ ID NO: 13870 - RNA, 98 nt, synthetic construct
  source 1..98: mol_type = other RNA
aaataaataaaaaaaaaaaaaaaaaaaaaaaaaaataaataaatatataaataaataaataaataaaaaaaaaaaaaaaaataaataaaaaatatata

SEQ ID NO: 13871 - RNA, 98 nt, synthetic construct
  source 1..98: mol_type = other RNA
aaataaataaataaaaaaaaaaaaaaaaaaaaaaataaataaatatataaataaataaataaaaaaaaaaaaaaaaaaaaataaataaaaaatatata

SEQ ID NO: 13872 - RNA, 98 nt, synthetic construct
  source 1..98: mol_type = other RNA
aaaaaaaaaaaaaaaatatataaataaatataaataaaaaaaaaaaaaaaaaaaaaaaaaaaaaaaaaaaaaaaaaaaaataaaaaaaaaaaaaatat

SEQ ID NO: 13873 - RNA, 98 nt, synthetic construct
  source 1..98: mol_type = other RNA
aaataaataaataaaaaaaaaaaaaaaaaaaaaaataaataaatatataaataaataaataaataaaaaaaaaaaaaaaaataaataaaaaatatata

SEQ ID NO: 13874 - RNA, 98 nt, synthetic construct
  source 1..98: mol_type = other RNA
aaataaataaataaataaaaaaaaaaaaaaaaaaataaataaatatataaataaataaataaaaaaaaaaaaaaaaaaaaataaataaaaaatatata

SEQ ID NO: 13875 - RNA, 98 nt, synthetic construct
  source 1..98: mol_type = other RNA
aaataaataaaaaaaaaaaaaaaaaaaaaaaaaaataaataaatatataaataaataaataaataaataaaaaaaaaaaaataaataaaaaatatata

SEQ ID NO: 13876 - RNA, 98 nt, synthetic construct
  source 1..98: mol_type = other RNA
aaataaataaataaataaaaaaaaaaaaaaaaaaataaataaatatataaataaataaataaataaaaaaaaaaaaaaaaataaataaaaaatatata

SEQ ID NO: 13877 - RNA, 98 nt, synthetic construct
  source 1..98: mol_type = other RNA
aaataaataaataaaaaaaaaaaaaaaaaaaaaaataaataaatatataaataaataaataaataaataaaaaaaaaaaaataaataaaaaatatata

SEQ ID NO: 13878 - RNA, 98 nt, synthetic construct
  source 1..98: mol_type = other RNA
aaataaataaataaataaaaaaaaaaaaaaaaaaataaataaatatataaataaataaataaataaataaaaaaaaaaaaataaataaaaaatatata

SEQ ID NO: 13879 - RNA, 98 nt, synthetic construct
  source 1..98: mol_type = other RNA
aaaaaaaaaaaaaaaaaaaaaaaaaaaaaaaaatataaaaaataaaaaaaaaaaaaaaaaaaaaaaaaaaataaataaaaaaaaaaaaaaaaaaataa

SEQ ID NO: 13880 - RNA, 98 nt, synthetic construct
  source 1..98: mol_type = other RNA
aaaaaaaaaaaaaaaaaaaaaaaaaaaaaaaaatataaaaaataaaaaaaaaaaaaaaaaaaaaaaaaaaataaataaataaaaaaaaaaaaaaataa

SEQ ID NO: 13881 - RNA, 98 nt, synthetic construct
  source 1..98: mol_type = other RNA
aaataaaaaaaaaaaaaaaaaaaaaaaaaaaataaaaaaaaaataaaaaaaaaaaaaaaaaaaaaaaaaaaaataaaaaaaaaaaaaaaaaatatata

SEQ ID NO: 13882 - RNA, 98 nt, synthetic construct
  source 1..98: mol_type = other RNA
aaataaaaaaaaaaaaaaaaaaaaaaaaaaaataaaaaaaaaataaaaaaaaaaaaaaaaaaaaaaaaaaaaataaaaaaaaaaaaaataaatatata

SEQ ID NO: 13883 - RNA, 98 nt, synthetic construct
  source 1..98: mol_type = other RNA
aaataaaaaaataaataaatataaataaatataaataaataaataaatatataaataaataaataaataaataaataaaaaaaaaaaaaaaaatataa

SEQ ID NO: 13884 - RNA, 98 nt, synthetic construct
  source 1..98: mol_type = other RNA
aaatataaataaaaaaaaaaaaaaaaaaataaaaaaaaaaaaaaaaaaaaaaaaaaaaaatataaataaataaataaataaaaaaaaaaaaataaata

SEQ ID NO: 13885 - RNA, 98 nt, synthetic construct
  source 1..98: mol_type = other RNA
aaatataaataaaaaaaaaaaaaaaaaaataaaaaaaaaaaaaaaaaaaaaaaaaaaaaatataaataaataaataaataaataaaaaaaaataaata

SEQ ID NO: 13886 - RNA, 98 nt, synthetic construct
  source 1..98: mol_type = other RNA
aaatataaataaaaaaaaaaaaaaaaaaataaaaaaaaaaaaaaaaaaaaaaaaaataaatataaataaataaataaataaaaaaaaaaaaataaata

SEQ ID NO: 13887 - RNA, 98 nt, synthetic construct
  source 1..98: mol_type = other RNA
aaatataaataaaaaaaaaaaaaaataaataaaaaaaaaaaaaaaaaaaaaaaaaaaaaatataaataaataaataaataaaaaaaaaaaaataaata

SEQ ID NO: 13888 - RNA, 98 nt, synthetic construct
  source 1..98: mol_type = other RNA
aaatataaataaaaaaaaaaaaaaaaaaataaataaaaaaaaaaaaaaaaaaaaaaaaaatataaataaataaataaataaaaaaaaaaaaataaata

SEQ ID NO: 13889 - RNA, 98 nt, synthetic construct
  source 1..98: mol_type = other RNA
aaatataaataaaaaaaaaaaaaaaaaaataaaaaaaaaaaaaaaaaaaaaaaaaataaatataaataaataaataaataaataaaaaaaaataaata

SEQ ID NO: 13890 - RNA, 98 nt, synthetic construct
  source 1..98: mol_type = other RNA
aaatataaataaaaaaaaaaataaataaataaaaaaaaaaaaaaaaaaaaaaaaaaaaaatataaataaataaataaataaaaaaaaaaaaataaata

SEQ ID NO: 13891 - RNA, 98 nt, synthetic construct
  source 1..98: mol_type = other RNA
aaatataaataaaaaaaaaaaaaaataaataaaaaaaaaaaaaaaaaaaaaaaaaaaaaatataaataaataaataaataaataaaaaaaaataaata

SEQ ID NO: 13892 - RNA, 98 nt, synthetic construct
  source 1..98: mol_type = other RNA
aaatataaataaaaaaaaaaaaaaataaataaaaaaaaaaaaaaaaaaaaaaaaaataaatataaataaataaataaataaaaaaaaaaaaataaata

SEQ ID NO: 13893 - RNA, 98 nt, synthetic construct
  source 1..98: mol_type = other RNA
aaatataaataaaaaaaaaaaaaaaaaaataaataaaaaaaaaaaaaaaaaaaaaataaatataaataaataaataaataaaaaaaaaaaaataaata

SEQ ID NO: 13894 - RNA, 98 nt, synthetic construct
  source 1..98: mol_type = other RNA
aaatataaataaaaaaaaaaaaaaataaataaataaaaaaaaaaaaaaaaaaaaaaaaaatataaataaataaataaataaaaaaaaaaaaataaata

SEQ ID NO: 13895 - RNA, 98 nt, synthetic construct
  source 1..98: mol_type = other RNA
aaatataaataaaaaaaaaaataaataaataaaaaaaaaaaaaaaaaaaaaaaaaataaatataaataaataaataaataaaaaaaaaaaaataaata

SEQ ID NO: 13896 - RNA, 98 nt, synthetic construct
  source 1..98: mol_type = other RNA
aaatataaataaaaaaaaaaataaataaataaaaaaaaaaaaaaaaaaaaaaaaaaaaaatataaataaataaataaataaataaaaaaaaataaata

SEQ ID NO: 13897 - RNA, 98 nt, synthetic construct
  source 1..98: mol_type = other RNA
aaatataaataaaaaaaaaaaaaaataaataaaaaaaaaaaaaaaaaaaaaaaaaataaatataaataaataaataaataaataaaaaaaaataaata

SEQ ID NO: 13898 - RNA, 98 nt, synthetic construct
  source 1..98: mol_type = other RNA
aaatataaataaaaaaaaaaataaataaataaataaaaaaaaaaaaaaaaaaaaaaaaaatataaataaataaataaataaaaaaaaaaaaataaata

SEQ ID NO: 13899 - RNA, 98 nt, synthetic construct
  source 1..98: mol_type = other RNA
aaatataaataaaaaaaaaaaaaaataaataaataaaaaaaaaaaaaaaaaaaaaataaatataaataaataaataaataaaaaaaaaaaaataaata

SEQ ID NO: 13900 - RNA, 98 nt, synthetic construct
  source 1..98: mol_type = other RNA
aaatataaataaaaaaaaaaataaataaataaataaaaaaaaaaaaaaaaaaaaaataaatataaataaataaataaataaaaaaaaaaaaataaata

SEQ ID NO: 13901 - RNA, 98 nt, synthetic construct
  source 1..98: mol_type = other RNA
aaatataaataaaaaaaaaaataaataaataaaaaaaaaaaaaaaaaaaaaaaaaataaatataaataaataaataaataaataaaaaaaaataaata

SEQ ID NO: 13902 - RNA, 98 nt, synthetic construct
  source 1..98: mol_type = other RNA
aaatataaataaaaaaaaaaataaataaataaataaaaaaaaaaaaaaaaaaaaaaaaaatataaataaataaataaataaataaaaaaaaataaata

SEQ ID NO: 13903 - RNA, 98 nt, synthetic construct
  source 1..98: mol_type = other RNA
aaatataaataaaaaaaaaaataaataaataaataaaaaaaaaaaaaaaaaaaaaataaatataaataaataaataaataaataaaaaaaaataaata

SEQ ID NO: 13904 - RNA, 98 nt, synthetic construct
  source 1..98: mol_type = other RNA
aaataaaaaataaataaataaataaataaataaatataaatataaataaatatataaaaaaaaaaaaaaaaaaaaaaaaaataaataaatataaatat

SEQ ID NO: 13905 - RNA, 98 nt, synthetic construct
  source 1..98: mol_type = other RNA
aaataaaaaataaataaataaataaataaataaatataaatataaataaatatataaataaaaaaaaaaaaaaaaaaaaaataaataaatataaatat

SEQ ID NO: 13906 - RNA, 98 nt, synthetic construct
  source 1..98: mol_type = other RNA
aaataaataaataaaaaaaaaaaaaaaaaaaaaaataaataaatatataaataaataaataaataaaaaaaaaaaaaaaaataaataaataatatata

SEQ ID NO: 13907 - RNA, 98 nt, synthetic construct
  source 1..98: mol_type = other RNA
aaaaaaaaaaaaataaataaataaatataaataaaaataaatatataaatataaataaaaaaaaaaaaaaaataaataaatataaataaataaatata

SEQ ID NO: 13908 - RNA, 98 nt, synthetic construct
  source 1..98: mol_type = other RNA
aaataaataaataaataaaaaaaaaaaaaaaaaaataaataaatatataaataaataaataaataaaaaaaaaaaaaaaaataaataaataatatata

SEQ ID NO: 13909 - RNA, 98 nt, synthetic construct
  source 1..98: mol_type = other RNA
aaaaaaaaaaaaaaaaaaaaaaaaaaaaaaaataaataaataaataaataaatataaaaaaaaataaaaaaaaaaaaaaaaaaaaaaaaaaaaaatac

SEQ ID NO: 13910 - RNA, 98 nt, synthetic construct
  source 1..98: mol_type = other RNA
aaaaaaaataaataaaaaaaaaaaaaaaaaaaaaaaaaaaaataaataaataaaaaaaaaaaataaaaaaaaaaaaaaaaaaaaataaaaaaaatata

SEQ ID NO: 13911 - RNA, 98 nt, synthetic construct
  source 1..98: mol_type = other RNA
aaaaaaaataaataaaaaaaaaaaaaaaaaaaaaaaaaaaaataaataaataaaaaaaaaaaataaaaaaaaaaaaaaaaataaataaaaaaaatata

SEQ ID NO: 13912 - RNA, 98 nt, synthetic construct
  source 1..98: mol_type = other RNA
aaaataaataaataaaaaaaaaaaaaaaaaaaaaaaaaaaaataaataaataaaaaaaaaaaataaaaaaaaaaaaaaaaaaaaataaaaaaaatata

SEQ ID NO: 13913 - RNA, 98 nt, synthetic construct
  source 1..98: mol_type = other RNA
aaataaaaaaaaaaaaaaaaaaaaaaaaaaaataaatatataaataaataaatataaaaaaaaataaaaaaaaaaaaaaaaaaaaaaaaaaaaaataa

SEQ ID NO: 13914 - RNA, 98 nt, synthetic construct
  source 1..98: mol_type = other RNA
aaaaaaaaaaataaataaaaaaaaaaaaaaaaaaaaaaaaaaaaaaaaaaaaaaaaaaaaaaaaataaaaaaaaaaaaaaaataaataaatataataa

SEQ ID NO: 13915 - RNA, 98 nt, synthetic construct
  source 1..98: mol_type = other RNA
aaaaaaaaaaaaaaaaaaaaaaaaaaaaaaaaaaaaaaaaaaaaaataaatataaaaaaaaaaaataaataaataaataaatataaatataaataata

SEQ ID NO: 13916 - RNA, 98 nt, synthetic construct
  source 1..98: mol_type = other RNA
aaaaaaataaataaataaaaaaaaaaaaaaaaaaaaaaaaaaaaaaaaaaaaaaaaaaaaaaaaataaaaaaaaaaaaaaaataaataaatataataa

SEQ ID NO: 13917 - RNA, 98 nt, synthetic construct
  source 1..98: mol_type = other RNA
aaataaatataaaaaaaaaaaaaaaaaaaaaaaaataaataaatatataaataaataaataaataaaaaaaaaaaaaaaaataaataaaaaatatata

SEQ ID NO: 13918 - RNA, 98 nt, synthetic construct
  source 1..98: mol_type = other RNA
aaataaataaaaaaaaaaaaaaaaaaaaaaaaaaataaataaatatataaataaataaataaatataaaaaaaaaaaaaaataaataaaaaatatata

SEQ ID NO: 13919 - RNA, 98 nt, synthetic construct
  source 1..98: mol_type = other RNA
aaataaataaatataaaaaaaaaaaaaaaaaaaaataaataaatatataaataaataaataaataaaaaaaaaaaaaaaaataaataaaaaatatata

SEQ ID NO: 13920 - RNA, 98 nt, synthetic construct
  source 1..98: mol_type = other RNA
aaataaataaataaaaaaaaaaaaaaaaaaaaaaataaataaatatataaataaataaataaatataaaaaaaaaaaaaaataaataaaaaatatata

SEQ ID NO: 13921 - RNA, 98 nt, synthetic construct
  source 1..98: mol_type = other RNA
aaataaataaataaatataaaaaaaaaaaaaaaaataaataaatatataaataaataaataaaaaaaaaaaaaaaaaaaaataaataaaaaatatata

SEQ ID NO: 13922 - RNA, 98 nt, synthetic construct
  source 1..98: mol_type = other RNA
aaataaataaataaatataaaaaaaaaaaaaaaaataaataaatatataaataaataaataaataaaaaaaaaaaaaaaaataaataaaaaatatata

SEQ ID NO: 13923 - RNA, 98 nt, synthetic construct
  source 1..98: mol_type = other RNA
aaataaataaatataaataaaaaaaaaaaaaaaaataaataaatatataaataaataaataaataaaaaaaaaaaaaaaaataaataaaaaatatata

SEQ ID NO: 13924 - RNA, 98 nt, synthetic construct
  source 1..98: mol_type = other RNA
aaataaataaataaataaaaaaaaaaaaaaaaaaataaataaatatataaataaataaataaatataaaaaaaaaaaaaaataaataaaaaatatata

SEQ ID NO: 13925 - RNA, 98 nt, synthetic construct
  source 1..98: mol_type = other RNA
aaataaataaaaaaaaaaaaaaaaaaaaaaaaaaataaataaatatataaataaataaataaaaaaaaaaaaaaaaaaaaataaaaaaaaaatataaa

SEQ ID NO: 13926 - RNA, 98 nt, synthetic construct
  source 1..98: mol_type = other RNA
aaataaataaataaatataaaaaaaaaaaaaaaaataaataaatatataaataaataaataaataaataaaaaaaaaaaaataaataaaaaatatata

SEQ ID NO: 13927 - RNA, 98 nt, synthetic construct
  source 1..98: mol_type = other RNA
aaataaataaataaatataaataaaaaaaaaaaaataaataaatatataaataaataaataaataaaaaaaaaaaaaaaaataaataaaaaatatata

SEQ ID NO: 13928 - RNA, 98 nt, synthetic construct
  source 1..98: mol_type = other RNA
aaaaataaataaaaaaaaaaaaaaaaaaataaaaaaaaaaaaaaaaaaaaaaaaaaaaaatataaataaataaataaataaaaaaaaaaaaataaata

SEQ ID NO: 13929 - RNA, 98 nt, synthetic construct
  source 1..98: mol_type = other RNA
aaataaataaatataaataaataaaaaaaaaaaaataaataaatatataaataaataaataaataaataaaaaaaaaaaaataaataaaaaatatata

SEQ ID NO: 13930 - RNA, 98 nt, synthetic construct
  source 1..98: mol_type = other RNA
aaataaaaaaaaaaaaaaaaaaaaaaaaaaaaaaaaaaaaaaaaaataaataaaaaaaaaaaaaataaataaataaataaatataaatataaataata

SEQ ID NO: 13931 - RNA, 98 nt, synthetic construct
  source 1..98: mol_type = other RNA
aaaaataaataaaaaaaaaaaaaaaaaaataaaaaaaaaaaaaaaaaaaaaaaaaataaatataaataaataaataaataaaaaaaaaaaaataaata

SEQ ID NO: 13932 - RNA, 98 nt, synthetic construct
  source 1..98: mol_type = other RNA
aaaaataaataaaaaaaaaaaaaaataaataaaaaaaaaaaaaaaaaaaaaaaaaaaaaatataaataaataaataaataaaaaaaaaaaaataaata

SEQ ID NO: 13933 - RNA, 98 nt, synthetic construct
  source 1..98: mol_type = other RNA
aaaaataaataaaaaaaaaaataaataaataaaaaaaaaaaaaaaaaaaaaaaaaaaaaatataaataaataaataaataaaaaaaaaaaaataaata

SEQ ID NO: 13934 - RNA, 98 nt, synthetic construct
  source 1..98: mol_type = other RNA
aaataaataaaaaaaatataaaaaaaaaaaaaaaaaaaaaaaaaaaaaaaaaaaaaaaataaaaaaaaaataaatataaataaaaaaaaataaatata

SEQ ID NO: 13935 - RNA, 98 nt, synthetic construct
  source 1..98: mol_type = other RNA
aaaaataaataaaaaaaaaaataaataaataaaaaaaaaaaaaaaaaaaaaaaaaataaatataaataaataaataaataaaaaaaaaaaaataaata

SEQ ID NO: 13936 - RNA, 98 nt, synthetic construct
  source 1..98: mol_type = other RNA
aaaaataaataaaaaaaaaaataaataaataaaaaaaaaaaaaaaaaaaaaaaaaaaaaatataaataaataaataaataaataaaaaaaaataaata

SEQ ID NO: 13937 - RNA, 98 nt, synthetic construct
  source 1..98: mol_type = other RNA
aaataaataaataaaatataaaaaaaaaaaaaaaaaaaaaaaaaaaaaaaaaaaaaaaataaaaaaaaaataaatataaataaaaaaaaataaatata

SEQ ID NO: 13938 - RNA, 98 nt, synthetic construct
  source 1..98: mol_type = other RNA
aaataaataaaaaaaatataaaaaaaaaaaaaaaaaaaaaaaaaaaaaaaaaaaaaaaataaataaaaaataaatataaataaaaaaaaataaatata

SEQ ID NO: 13939 - RNA, 98 nt, synthetic construct
  source 1..98: mol_type = other RNA
aaaaataaataaaaaaaaaaataaataaataaaaaaaaaaaaaaaaaaaaaaaaaataaatataaataaataaataaataaataaaaaaaaataaata

SEQ ID NO: 13940 - RNA, 98 nt, synthetic construct
  source 1..98: mol_type = other RNA
aaaaataaataaaaaaaaaaataaataaataaataaaaaaaaaaaaaaaaaaaaaataaatataaataaataaataaataaaaaaaaaaaaataaata

SEQ ID NO: 13941 - RNA, 98 nt, synthetic construct
  source 1..98: mol_type = other RNA
aaataaataaataaaatataaaaaaaaaaaaaaaaaaaaaaaaaaaaaaaaaaaaaaaataaataaaaaataaatataaataaaaaaaaataaatata

SEQ ID NO: 13942 - RNA, 98 nt, synthetic construct
  source 1..98: mol_type = other RNA
aaataaataaataaaatataaataaaaaaaaaaaaaaaaaaaaaaaaaaaaaaaaaaaataaaaaaaaaataaatataaataaaaaaaaataaatata

SEQ ID NO: 13943 - RNA, 98 nt, synthetic construct
  source 1..98: mol_type = other RNA
aaataaataaataaaatataaaaaaaaaaaaaaaaaaaaaaaaaaaaaaaaaaaaaaaataaaaaaaaaataaatataaataaataaaaataaatata

SEQ ID NO: 13944 - RNA, 98 nt, synthetic construct
  source 1..98: mol_type = other RNA
aaaaaaaaaaaaaaaaaaaaaaaaaaaaaaaaatataaaaaatataaaaaaaaaaaaaaaaaaaaaaaaaataaataaataaaaaaaaaaaaaaataa

SEQ ID NO: 13945 - RNA, 98 nt, synthetic construct
  source 1..98: mol_type = other RNA
aaataaataaataaaatataaataaaaaaaaaaaaaaaaaaaaaaaaaaaaaaaaaaaataaataaaaaataaatataaataaaaaaaaataaatata

SEQ ID NO: 13946 - RNA, 98 nt, synthetic construct
  source 1..98: mol_type = other RNA
aaataaataaataaaatataaataaataaaaaaaaaaaaaaaaaaaaaaaaaaaaaaaataaaaaaaaaataaatataaataaaaaaaaataaatata

SEQ ID NO: 13947 - RNA, 98 nt, synthetic construct
  source 1..98: mol_type = other RNA
aaataataaataaataaataaataaataaataaatataaatataaataaatatataaaaaaaaaaaaaaaaaaaaaaaaaataaataaatataaatat

SEQ ID NO: 13948 - RNA, 98 nt, synthetic construct
  source 1..98: mol_type = other RNA
aaataaataaataaaatataaataaataaaaaaaaaaaaaaaaaaaaaaaaaaaaaaaataaataaaaaataaatataaataaaaaaaaataaatata

SEQ ID NO: 13949 - RNA, 98 nt, synthetic construct
  source 1..98: mol_type = other RNA
aaataaataaataaaatataaataaataaataaaaaaaaaaaaaaaaaaaaaaaaaaaataaaaaaaaaataaatataaataaaaaaaaataaatata

SEQ ID NO: 13950 - RNA, 98 nt, synthetic construct
  source 1..98: mol_type = other RNA
aaataataaataaataaataaataaataaataaatataaatataaataaatatataaataaaaaaaaaaaaaaaaaaaaaataaataaatataaatat

SEQ ID NO: 13951 - RNA, 98 nt, synthetic construct
  source 1..98: mol_type = other RNA
aaataaataaataaaatataaataaataaataaaaaaaaaaaaaaaaaaaaaaaaaaaataaataaaaaataaatataaataaaaaaaaataaatata

SEQ ID NO: 13952 - RNA, 98 nt, synthetic construct
  source 1..98: mol_type = other RNA
aaataaataaataaaatataaataaataaataaataaaaaaaaaaaaaaaaaaaaaaaataaaaaaaaaataaatataaataaaaaaaaataaatata

SEQ ID NO: 13953 - RNA, 98 nt, synthetic construct
  source 1..98: mol_type = other RNA
aaataaataaataaaatataaataaataaataaataaaaaaaaaaaaaaaaaaaaaaaataaataaaaaataaatataaataaaaaaaaataaatata

SEQ ID NO: 13954 - RNA, 98 nt, synthetic construct
  source 1..98: mol_type = other RNA
aaaaaaaaataaaaaaaaaaaaaaaaaaaaaaaaaaaaaaaaaaaaaaaaaaaaaataaaaaaaaaataaatataaaaaaaaaatataaataaataaa

SEQ ID NO: 13955 - RNA, 98 nt, synthetic construct
  source 1..98: mol_type = other RNA
aaaaaaaaataaaaaaaaaaaaaaaaaaaaaaaaaaaaaaaaaaaaaataaaaaaaaaaaaaaaaaataaatataaaaaaaaaatataaataaataaa

SEQ ID NO: 13956 - RNA, 98 nt, synthetic construct
  source 1..98: mol_type = other RNA
aaaaaaaaataaaaaaaaaaaaaaaaaaaaaaaaaaataaaaaaaaaaaaaaaaaaaaaaaaaaaaataaatataaaaaaaaaatataaataaataaa

SEQ ID NO: 13957 - RNA, 98 nt, synthetic construct
  source 1..98: mol_type = other RNA
aaaaaaaaataaaaaataaaaaaaaaaaaaaaaaaaaaaaaaaaaaaaaaaaaaaaaaaaaaaaaaataaatataaaaaaaaaatataaataaataaa

SEQ ID NO: 13958 - RNA, 98 nt, synthetic construct
  source 1..98: mol_type = other RNA
aaaaaaaaaaaaataaataaataaatataaatataaataaatatataaatataaataaaaaaaaaaaaaaaataaataaatataaataaatatatata

SEQ ID NO: 13959 - RNA, 98 nt, synthetic construct
  source 1..98: mol_type = other RNA
aaaaaaaaaaaaataaataaataaatataaatatatataaatatataaatataaataaaaaaaaaaaaaaaataaataaatataaataaataaatata

SEQ ID NO: 13960 - RNA, 98 nt, synthetic construct
  source 1..98: mol_type = other RNA
aaaaaaaaaaaaataaataaataaatataaatataaataaatatataaatataaataaaaaaaaaaaaaaaataaataaatatatataaataaatata

SEQ ID NO: 13961 - RNA, 99 nt, synthetic construct
  source 1..99: mol_type = other RNA
aaataaatataaataaaaaaaaaaaaaaaaaaaaaaaaaaaaaaaaaaaaaaaaaaaaaaaataaataaaaaaaaaaaataaataaataaataaataat

SEQ ID NO: 13962 - RNA, 99 nt, synthetic construct
  source 1..99: mol_type = other RNA
aaataaatataaataaaaaaaaaaaaaaaaaaaaaaaaaaaaaaaaaaaaaaaaaaaaaaaataaataaaaaaaataaataaataaataaataaataat

SEQ ID NO: 13963 - RNA, 99 nt, synthetic construct
  source 1..99: mol_type = other RNA
aaataaatataaataaaaaaaaaaaaaaaaaaaaaaaaaaaaaaaaaaaaaaaaaaaataaataaataaaaaaaaaaaataaataaataaataaataat

SEQ ID NO: 13964 - RNA, 99 nt, synthetic construct
  source 1..99: mol_type = other RNA
aaataaatataaataaaaaaaaaaaaaaaaaaaaaaaaaaaaaaaaaaaaaaaaaaaataaataaataaaaaaaataaataaataaataaataaataat

SEQ ID NO: 13965 - RNA, 99 nt, synthetic construct
  source 1..99: mol_type = other RNA
aaataaatataaataaaaaaaaaaaaaaaaaaaaaaaaaaaaaaaaaaaaaaaaaaaaaaaataaataaaataaataaataaataaataaataaataat

SEQ ID NO: 13966 - RNA, 99 nt, synthetic construct
  source 1..99: mol_type = other RNA
aaataaatataaataaataaaaaaaaaaaaaaaaaaaaaaaaaaaaaaaaaaaaaaaaaaaataaataaaaaaaataaataaataaataaataaataat

SEQ ID NO: 13967 - RNA, 99 nt, synthetic construct
  source 1..99: mol_type = other RNA
aaataaatataaataaaaaaaaaaaaaaaaaaaaaaaaaaaaaaaaaaaaaaaaaaaataaataaataaaataaataaataaataaataaataaataat

SEQ ID NO: 13968 - RNA, 99 nt, synthetic construct
  source 1..99: mol_type = other RNA
aaataaatataaataaataaaaaaaaaaaaaaaaaaaaaaaaaaaaaaaaaaaaaaaataaataaataaaaaaaataaataaataaataaataaataat

SEQ ID NO: 13969 - RNA, 99 nt, synthetic construct
  source 1..99: mol_type = other RNA
aaataaatataaataaataaataaaaaaaaaaaaaaaaaaaaaaaaaaaaaaaaaaaaaaaataaataaaaaaaataaataaataaataaataaataat

SEQ ID NO: 13970 - RNA, 99 nt, synthetic construct
  source 1..99: mol_type = other RNA
aaataaatataaataaataaaaaaaaaaaaaaaaaaaaaaaaaaaaaaaaaaaaaaaaaaaataaataaaataaataaataaataaataaataaataat

SEQ ID NO: 13971 - RNA, 99 nt, synthetic construct
  source 1..99: mol_type = other RNA
aaataaatataaataaataaataaaaaaaaaaaaaaaaaaaaaaaaaaaaaaaaaaaataaataaataaaaaaaataaataaataaataaataaataat

SEQ ID NO: 13972 - RNA, 99 nt, synthetic construct
  source 1..99: mol_type = other RNA
aaataaatataaataaataaaaaaaaaaaaaaaaaaaaaaaaaaaaaaaaaaaaaaaataaataaataaaataaataaataaataaataaataaataat

SEQ ID NO: 13973 - RNA, 99 nt, synthetic construct
  source 1..99: mol_type = other RNA
aaataaatataaataaataaataaaaaaaaaaaaaaaaaaaaaaaaaaaaaaaaaaaaaaaataaataaaataaataaataaataaataaataaataat

SEQ ID NO: 13974 - RNA, 99 nt, synthetic construct
  source 1..99: mol_type = other RNA
aaataaatataaataaataaataaaaaaaaaaaaaaaaaaaaaaaaaaaaaaaaaaaataaataaataaaataaataaataaataaataaataaataat

SEQ ID NO: 13975 - RNA, 99 nt, synthetic construct
  source 1..99: mol_type = other RNA
aaataaatataaatataaaaaaaaaaaaaaaaaaaaaaaaaaaaaaaaaaaaaaaaaaaaaataaataaaaaaaataaataaataaataaataaataat

SEQ ID NO: 13976 - RNA, 99 nt, synthetic construct
  source 1..99: mol_type = other RNA
aaataaatataaatataaaaaaaaaaaaaaaaaaaaaaaaaaaaaaaaaaaaaaaaaataaataaataaaaaaaataaataaataaataaataaataat

SEQ ID NO: 13977 - RNA, 99 nt, synthetic construct
  source 1..99: mol_type = other RNA
aaataaatataaatataaaaaaaaaaaaaaaaaaaaaaaaaaaaaaaaaaaaaaaaaaaaaataaataaaataaataaataaataaataaataaataat

SEQ ID NO: 13978 - RNA, 99 nt, synthetic construct
  source 1..99: mol_type = other RNA
aaataaatataaataaaaaaaaaaaaaaaaaaaaaaaaaaaaaaaaaaaaaaaaaaaataaataaatataaaaaataaataaataaataaataaataat

SEQ ID NO: 13979 - RNA, 99 nt, synthetic construct
  source 1..99: mol_type = other RNA
aaataaatataaatataaaaaaaaaaaaaaaaaaaaaaaaaaaaaaaaaaaaaaaaaataaataaataaaataaataaataaataaataaataaataat

SEQ ID NO: 13980 - RNA, 99 nt, synthetic construct
  source 1..99: mol_type = other RNA
aaataaatataaataaataaaaaaaaaaaaaaaaaaaaaaaaaaaaaaaaaaaaaaaataaataaatataaaaaataaataaataaataaataaataat

SEQ ID NO: 13981 - RNA, 99 nt, synthetic construct
  source 1..99: mol_type = other RNA
aaataaatataaataaataaatataaaaaaaaaaaaaaaaaaaaaaaaaaaaaaaaaaaaaataaataaaaaaaataaataaataaataaataaataat

SEQ ID NO: 13982 - RNA, 99 nt, synthetic construct
  source 1..99: mol_type = other RNA
aaataaatataaatataaataaaaaaaaaaaaaaaaaaaaaaaaaaaaaaaaaaaaaataaataaataaaaaaaataaataaataaataaataaataat

SEQ ID NO: 13983 - RNA, 99 nt, synthetic construct
  source 1..99: mol_type = other RNA
aaataaatataaataaataaatataaaaaaaaaaaaaaaaaaaaaaaaaaaaaaaaaataaataaataaaaaaaataaataaataaataaataaataat

SEQ ID NO: 13984 - RNA, 99 nt, synthetic construct
  source 1..99: mol_type = other RNA
aaataaatataaataaataaatataaataaaaaaaaaaaaaaaaaaaaaaaaaaaaaaaaaataaataaaaaaaataaataaataaataaataaataat

SEQ ID NO: 13985 - RNA, 99 nt, synthetic construct
  source 1..99: mol_type = other RNA
aaataaatataaatataaataaaaaaaaaaaaaaaaaaaaaaaaaaaaaaaaaaaaaataaataaataaaataaataaataaataaataaataaataat

SEQ ID NO: 13986 - RNA, 99 nt, synthetic construct
  source 1..99: mol_type = other RNA
aaataaatataaatataaataaataaaaaaaaaaaaaaaaaaaaaaaaaaaaaaaaaataaataaataaaaaaaataaataaataaataaataaataat

SEQ ID NO: 13987 - RNA, 99 nt, synthetic construct
  source 1..99: mol_type = other RNA
aaataaatataaatataaataaataaataaaaaaaaaaaaaaaaaaaaaaaaaaaaaataaataaataaaaaaaataaataaataaataaataaataat

SEQ ID NO: 13988 - RNA, 99 nt, synthetic construct
  source 1..99: mol_type = other RNA
aaataaatataaataaataaatataaataaaaaaaaaaaaaaaaaaaaaaaaaaaaaataaataaataaaaaaaataaataaataaataaataaataat

SEQ ID NO: 13989 - RNA, 99 nt, synthetic construct
  source 1..99: mol_type = other RNA
aaataaatataaataaataaatataaaaaaaaaaaaaaaaaaaaaaaaaaaaaaaaaataaataaataaaataaataaataaataaataaataaataat

SEQ ID NO: 13990 - RNA, 99 nt, synthetic construct
  source 1..99: mol_type = other RNA
aaataaatataaataaataaatataaataaaaaaaaaaaaaaaaaaaaaaaaaaaaaaaaaataaataaaataaataaataaataaataaataaataat

SEQ ID NO: 13991 - RNA, 99 nt, synthetic construct
  source 1..99: mol_type = other RNA
aaataaatataaatataaataaataaaaaaaaaaaaaaaaaaaaaaaaaaaaaaaaaataaataaataaaataaataaataaataaataaataaataat

SEQ ID NO: 13992 - RNA, 99 nt, synthetic construct
  source 1..99: mol_type = other RNA
aaataaatataaataaatataaataaataaaaaaaaaaaaaaaaaaaaaaaaaaaaaataaataaataaaaaaaataaataaataaataaataaataat

SEQ ID NO: 13993 - RNA, 99 nt, synthetic construct
  source 1..99: mol_type = other RNA
aaataaatataaatataaataaataaataaaaaaaaaaaaaaaaaaaaaaaaaaaaaataaataaataaaataaataaataaataaataaataaataat

SEQ ID NO: 13994 - RNA, 99 nt, synthetic construct
  source 1..99: mol_type = other RNA
aaataaatataaataaataaatataaataaaaaaaaaaaaaaaaaaaaaaaaaaaaaataaataaataaaataaataaataaataaataaataaataat

SEQ ID NO: 13995 - RNA, 99 nt, synthetic construct
  source 1..99: mol_type = other RNA
aaataaatataaataaatataaataaataaaaaaaaaaaaaaaaaaaaaaaaaaaaaataaataaataaaataaataaataaataaataaataaataat

SEQ ID NO: 13996 - RNA, 99 nt, synthetic construct
  source 1..99: mol_type = other RNA
aaataaatataaataaaaaaaaaaaaaaaaaaaaaaaaaaaaaaaaaaaaaaaaaaaataaataaatataataaataaataaataaataaataaataat

SEQ ID NO: 13997 - RNA, 99 nt, synthetic construct
  source 1..99: mol_type = other RNA
aaataaaaataaataaaaaaaaaaaaaaaaaaaaaaaaaaaaaaaaaaaaaaaaaaaaaaaataaataaaaaaaaaaaataaataaataaataaataat

SEQ ID NO: 13998 - RNA, 99 nt, synthetic construct
  source 1..99: mol_type = other RNA
aaataaatataaatataaaaaaaaaaaaaaaaaaaaaaaaaaaaaaaaaaaaaaaaaataaataaatataaaaaataaataaataaataaataaataat

SEQ ID NO: 13999 - RNA, 99 nt, synthetic construct
  source 1..99: mol_type = other RNA
aaataaatataaatataaatataaaaaaaaaaaaaaaaaaaaaaaaaaaaaaaaaaaaaaaataaataaaaaaaataaataaataaataaataaataat

SEQ ID NO: 14000 - RNA, 99 nt, synthetic construct
  source 1..99: mol_type = other RNA
aaataaatataaatataaatataaaaaaaaaaaaaaaaaaaaaaaaaaaaaaaaaaaataaataaataaaaaaaataaataaataaataaataaataat

SEQ ID NO: 14001 - RNA, 99 nt, synthetic construct
  source 1..99: mol_type = other RNA
aaataaatataaatataaatataaaaaaaaaaaaaaaaaaaaaaaaaaaaaaaaaaaaaaaataaataaaataaataaataaataaataaataaataat

SEQ ID NO: 14002 - RNA, 99 nt, synthetic construct
  source 1..99: mol_type = other RNA
aaataaatataaatataaataaaaaaaaaaaaaaaaaaaaaaaaaaaaaaaaaaaaaataaataaatataaaaaataaataaataaataaataaataat

SEQ ID NO: 14003 - RNA, 99 nt, synthetic construct
  source 1..99: mol_type = other RNA
aaataaatataaatataaatataaaaaaaaaaaaaaaaaaaaaaaaaaaaaaaaaaaataaataaataaaataaataaataaataaataaataaataat

SEQ ID NO: 14004 - RNA, 99 nt, synthetic construct
  source 1..99: mol_type = other RNA
aaataaatataaataaataaatataaataaaaaaaaaaaaaaaaaaaaaaaaaaaaaataaataaatataaaaaataaataaataaataaataaataat

SEQ ID NO: 14005 - RNA, 99 nt, synthetic construct
  source 1..99: mol_type = other RNA
aaataaatataaataaaaaaaaaaaaaaaaaaaaaaaaaaaaaaaaaaaaaaaaaaaaaaaataaataaaaaaaaaaaataaatatataaataaataat

SEQ ID NO: 14006 - RNA, 99 nt, synthetic construct
  source 1..99: mol_type = other RNA
aaataaatataaataaaaaaaaaaaaaaaaaaaaaaaaaaaaaaaaaaaaaaaaaaaaaaaataaataaaaaaaataaataaataaataaatatataat

SEQ ID NO: 14007 - RNA, 99 nt, synthetic construct
  source 1..99: mol_type = other RNA
aaataaatataaatatataaaaaaaaaaaaaaaaaaaaaaaaaaaaaaaaaaaaaaaataaataaataaaaaaaataaataaataaataaataaataat

SEQ ID NO: 14008 - RNA, 99 nt, synthetic construct
  source 1..99: mol_type = other RNA
aaataaatataaataaatatataaaaaaaaaaaaaaaaaaaaaaaaaaaaaaaaaaaataaataaataaaaaaaataaataaataaataaataaataat

SEQ ID NO: 14009 - RNA, 99 nt, synthetic construct
  source 1..99: mol_type = other RNA
aaataaatataaatatataaataaaaaaaaaaaaaaaaaaaaaaaaaaaaaaaaaaaataaataaataaaaaaaataaataaataaataaataaataat

SEQ ID NO: 14010 - RNA, 99 nt, synthetic construct
  source 1..99: mol_type = other RNA
aaataaatataaataaatatataaaaaaaaaaaaaaaaaaaaaaaaaaaaaaaaaaaataaataaataaaataaataaataaataaataaataaataat

SEQ ID NO: 14011 - RNA, 99 nt, synthetic construct
  source 1..99: mol_type = other RNA
aaatatatataaataaaaaaaaaaaaaaaaaaaaaaaaaaaaaaaaaaaaaaaaaaaaaaaataaataaaaaaaaaaaataaataaataaataaataat

SEQ ID NO: 14012 - RNA, 99 nt, synthetic construct
  source 1..99: mol_type = other RNA
aaataaatataaatataaaaaaaaaaaaaaaaaaaaaaaaaaaaaaaaaaaaaaaaaataaataaatataataaataaataaataaataaataaataat

SEQ ID NO: 14013 - RNA, 99 nt, synthetic construct
  source 1..99: mol_type = other RNA
aaataaatataaataaaaaaaaaaaaaaaaaaaaaaaaaaaaaaaaaaaaaaaaaaaaaaaataaataaaaaaaaaaaataaataaataaataaataag

SEQ ID NO: 14014 - RNA, 99 nt, synthetic construct
  source 1..99: mol_type = other RNA
aaataaatataaataaaaaaaaaaaaaaaaaaaaaaaaaaaaaaaaaaaaaaaaaaaaaaaataaataaaaaaaataaataaataaataaataaataag

SEQ ID NO: 14015 - RNA, 99 nt, synthetic construct
  source 1..99: mol_type = other RNA
aaataaatataaataaaaaaaaaaaaaaaaaaaaaaaaaaaaaaaaaaaaaaaaaaaataaataaataaaaaaaataaataaataaataaataaataag

SEQ ID NO: 14016 - RNA, 99 nt, synthetic construct
  source 1..99: mol_type = other RNA
aaataaatataaataaataaaaaaaaaaaaaaaaaaaaaaaaaaaaaaaaaaaaaaaaaaaataaataaaaaaaataaataaataaataaataaataag

SEQ ID NO: 14017 - RNA, 99 nt, synthetic construct
  source 1..99: mol_type = other RNA
aaataaatataaataaaaaaaaaaaaaaaaaaaaaaaaataaaaaaaaaaaaaaaaaaaaaataaataaaaaaaaaaaataaataaataaataaataat

SEQ ID NO: 14018 - RNA, 99 nt, synthetic construct
  source 1..99: mol_type = other RNA
aaataaatataaataaaaaaaaaaaaaaaaaaaaaaaaaaaaaaaaaaaaaaaaataaaaaataaataaaaaaaaaaaataaataaataaataaataat

SEQ ID NO: 14019 - RNA, 99 nt, synthetic construct
  source 1..99: mol_type = other RNA
aaataaatataaataaaaaaaaaaaaaaaaaaaaaaaaaaaaataaaaaaaaaaaaaaaaaataaataaaaaaaaaaaataaataaataaataaataat

SEQ ID NO: 14020 - RNA, 99 nt, synthetic construct
  source 1..99: mol_type = other RNA
aaataaatataaataaaaaaaaaaaaaaaaaaaaaaaaaaaaaaaaaaaaataaaaaaaaaataaataaaaaaaaaaaataaataaataaataaataat

SEQ ID NO: 14021 - RNA, 99 nt, synthetic construct
  source 1..99: mol_type = other RNA
aaataaatataaataaaaaaaaaaaaaaaaaaaaaataaaaaaaaaaaaaaaaaaaaaaaaataaataaaaaaaaaaaataaataaataaataaataat

SEQ ID NO: 14022 - RNA, 99 nt, synthetic construct
  source 1..99: mol_type = other RNA
aaataaatataaataaaaaaaaaaaaaaaaataaaaaaaaaaaaaaaaaaaaaaaaaaaaaataaataaaaaaaaaaaataaataaataaataaataat

SEQ ID NO: 14023 - RNA, 99 nt, synthetic construct
  source 1..99: mol_type = other RNA
aaataaatataaataaaaaaaaaaaaaaaaaaaaaaaaaaaataaaaaaaaaaaaaaaaaaataaataaaaaaaaaaaataaataaataaataaataat

SEQ ID NO: 14024 - RNA, 99 nt, synthetic construct
  source 1..99: mol_type = other RNA
aaataaatataaataaaaaaaaaaaaaaaataaaaaaaaaaaaaaaaaaaaaaaaaaaaaaataaataaaaaaaaaaaataaataaataaataaataat

SEQ ID NO: 14025 - RNA, 99 nt, synthetic construct
  source 1..99: mol_type = other RNA
aaataaatataaataaaaaaaaaaaaaaaaaaaaaaaaaaaaaaaataaaaaaaaaaaaaaataaataaaaaaaaaaaataaataaataaataaataat

SEQ ID NO: 14026 - RNA, 99 nt, synthetic construct
  source 1..99: mol_type = other RNA
aaataaatataaataaaaaaaaaaaaaaaaaaaaaaaaaaaaaaaaaaaaataaaaaaaaaataaataaaaaaaataaataaataaataaataaataat

SEQ ID NO: 14027 - RNA, 99 nt, synthetic construct
  source 1..99: mol_type = other RNA
aaataaatataaataaaaaaataaaaaaaaaaaaaaaaaaaaaaaaaaaaaaaaaaaaaaaataaataaaaaaaataaataaataaataaataaataat

SEQ ID NO: 14028 - RNA, 99 nt, synthetic construct
  source 1..99: mol_type = other RNA
aaataaatataaataaaaaaaaaaaaataaaaaaaaaaaaaaaaaaaaaaaaaaaaaaaaaataaataaaaaaaataaataaataaataaataaataat

SEQ ID NO: 14029 - RNA, 99 nt, synthetic construct
  source 1..99: mol_type = other RNA
aaataaatataaataaaaaaaaaaaaaaaaaaaaataaaaaaaaaaaaaaaaaaaaaaaaaataaataaaaaaaataaataaataaataaataaataat

SEQ ID NO: 14030 - RNA, 99 nt, synthetic construct
  source 1..99: mol_type = other RNA
aaataaatataaataaaaaaaaaaaaaaaaaaaaaaataaaaaaaaaaaaaaaaaaaaaaaataaataaaaaaaataaataaataaataaataaataat

SEQ ID NO: 14031 - RNA, 99 nt, synthetic construct
  source 1..99: mol_type = other RNA
aaataaatataaataaaaaaaaaaaaaaaaaaaaaaaaaaaaaaaaaaaaataaaaaataaataaataaaaaaaataaataaataaataaataaataat

SEQ ID NO: 14032 - RNA, 99 nt, synthetic construct
  source 1..99: mol_type = other RNA
aaataaatataaataaaaaaaaaaaaaaaaaaaaaaaaaaaaaaaaaaaaataaaaaaaaaataaataaaataaataaataaataaataaataaataat

SEQ ID NO: 14033 - RNA, 99 nt, synthetic construct
  source 1..99: mol_type = other RNA
aaataaatataaataaaaaaaaaaaaaaaaaaaaaaaaaaaataaaaaaaaaaaaaaataaataaataaaaaaaataaataaataaataaataaataat

SEQ ID NO: 14034 - RNA, 99 nt, synthetic construct
  source 1..99: mol_type = other RNA
aaataaatataaataaaaaaaaaaaaaaaaaaaaaaaaaaataaaaaaaaaaaaaaaataaataaataaaaaaaataaataaataaataaataaataat

SEQ ID NO: 14035 - RNA, 99 nt, synthetic construct
  source 1..99: mol_type = other RNA
aaataaatataaataaaaaaaaataaaaaaaaaaaaaaaaaaaaaaaaaaaaaaaaaataaataaataaaaaaaataaataaataaataaataaataat

SEQ ID NO: 14036 - RNA, 99 nt, synthetic construct
  source 1..99: mol_type = other RNA
aaataaatataaataaaaaaaaaaaaataaaaaaaaaaaaaaaaaaaaaaaaaaaaaataaataaataaaaaaaataaataaataaataaataaataat

SEQ ID NO: 14037 - RNA, 99 nt, synthetic construct
  source 1..99: mol_type = other RNA
aaataaatataaataaaaataaaaaaaaaaaaaaaaaaaaaaaaaaaaaaaaaaaaaataaataaataaaaaaaataaataaataaataaataaataat

SEQ ID NO: 14038 - RNA, 99 nt, synthetic construct
  source 1..99: mol_type = other RNA
aaataaatataaataaaaaaataaaaaaaaaaaaaaaaaaaaaaaaaaaaaaaaaaaataaataaataaaaaaaataaataaataaataaataaataat

SEQ ID NO: 14039 - RNA, 99 nt, synthetic construct
  source 1..99: mol_type = other RNA
aaataaatataaataaataaaaaaaaaaaaaaaaaaaaaaaaaaaaaaaaataaaaaaaaaataaataaaaaaaataaataaataaataaataaataat

SEQ ID NO: 14040 - RNA, 99 nt, synthetic construct
  source 1..99: mol_type = other RNA
aaataaatataaataaaaaaaaaaaaaaaaaaaaaaaaaaaataaataaaaaaaaaaataaataaataaaaaaaataaataaataaataaataaataat

SEQ ID NO: 14041 - RNA, 99 nt, synthetic construct
  source 1..99: mol_type = other RNA
aaataaatataaataaaaaaaaaaaaaaaaaaaaaaaaaaaaaaaaaaaaataaaaaataaataaataaaataaataaataaataaataaataaataat

SEQ ID NO: 14042 - RNA, 99 nt, synthetic construct
  source 1..99: mol_type = other RNA
aaataaatataaataaataaataaaaaaaaaaaaaaaaaaaaaaaaaaaaataaaaaaaaaataaataaaaaaaataaataaataaataaataaataat

SEQ ID NO: 14043 - RNA, 99 nt, synthetic construct
  source 1..99: mol_type = other RNA
aaataaatataaataaaaaaaaataaataaaaaaaaaaaaaaaaaaaaaaaaaaaaaataaataaataaaaaaaataaataaataaataaataaataat

SEQ ID NO: 14044 - RNA, 99 nt, synthetic construct
  source 1..99: mol_type = other RNA
aaataaatataaataaaaaaaaataaaaaaaaaaaaaaaaaaaaaaaaaaaaaaaaaataaataaataaaataaataaataaataaataaataaataat

SEQ ID NO: 14045 - RNA, 99 nt, synthetic construct
  source 1..99: mol_type = other RNA
aaataaatataaataaaaaaaaaaaaaaaaaaaaaaaaaaataaaaaaaaaaaaaaaataaataaataaaataaataaataaataaataaataaataat

SEQ ID NO: 14046 - RNA, 99 nt, synthetic construct
  source 1..99: mol_type = other RNA
aaataaatataaataaataaataaaaaaaaaaaaaaaaaaataaaaaaaaaaaaaaaaaaaataaataaaaaaaataaataaataaataaataaataat

SEQ ID NO: 14047 - RNA, 99 nt, synthetic construct
  source 1..99: mol_type = other RNA
aaataaatataaataaataaaaaaaaaaaaaaaaaaaaaaataaaaaaaaaaaaaaaataaataaataaaaaaaataaataaataaataaataaataat

SEQ ID NO: 14048 - RNA, 99 nt, synthetic construct
  source 1..99: mol_type = other RNA
aaataaatataaataaataaaaaaaaaaaaaaaaaaaaaaaaaaaaaaaaataaaaaataaataaataaaaaaaataaataaataaataaataaataat

SEQ ID NO: 14049 - RNA, 99 nt, synthetic construct
  source 1..99: mol_type = other RNA
aaataaatataaataaaaaaaaaaaaataaaaaaaaaaaaaaaaaaaaaaaaaaaaaataaataaataaaataaataaataaataaataaataaataat

SEQ ID NO: 14050 - RNA, 99 nt, synthetic construct
  source 1..99: mol_type = other RNA
aaataaatataaataaataaaaataaaaaaaaaaaaaaaaaaaaaaaaaaaaaaaaaataaataaataaaaaaaataaataaataaataaataaataat

SEQ ID NO: 14051 - RNA, 99 nt, synthetic construct
  source 1..99: mol_type = other RNA
aaataaatataaataaataaataaaaaaaaaaaaaaaaaaataaaaaaaaaaaaaaaataaataaataaaaaaaataaataaataaataaataaataat

SEQ ID NO: 14052 - RNA, 99 nt, synthetic construct
  source 1..99: mol_type = other RNA
aaataaatataaataaataaaaataaataaaaaaaaaaaaaaaaaaaaaaaaaaaaaataaataaataaaaaaaataaataaataaataaataaataat

SEQ ID NO: 14053 - RNA, 99 nt, synthetic construct
  source 1..99: mol_type = other RNA
aaataaatataaataaaaaaaaataaataaaaaaaaaaaaaaaaaaaaaaaaaaaaaataaataaataaaataaataaataaataaataaataaataat

SEQ ID NO: 14054 - RNA, 99 nt, synthetic construct
  source 1..99: mol_type = other RNA
aaataaatataaataaataaataaaaaaaaaaaaaaaaaaaaaaaaaaaaataaaaaataaataaataaaaaaaataaataaataaataaataaataat

SEQ ID NO: 14055 - RNA, 99 nt, synthetic construct
  source 1..99: mol_type = other RNA
aaataaatataaataaataaataaaaaaaaaaaaaaaaaaaaaaaaaaaaataaaaaaaaaataaataaaataaataaataaataaataaataaataat

SEQ ID NO: 14056 - RNA, 99 nt, synthetic construct
  source 1..99: mol_type = other RNA
aaataaatataaataaataaaaataaaaaaaaaaaaaaaaaaaaaaaaaaaaaaaaaataaataaataaaataaataaataaataaataaataaataat

SEQ ID NO: 14057 - RNA, 99 nt, synthetic construct
  source 1..99: mol_type = other RNA
aaataaatataaataaataaataaaaaaaaaaaaaaaaaaataaaaaaaaaaaaaaaaaaaataaataaaataaataaataaataaataaataaataat

SEQ ID NO: 14058 - RNA, 99 nt, synthetic construct
  source 1..99: mol_type = other RNA
aaataaatataaataaaaataaataaataaaaaaaaaaaaaaaaaaaaaaaaaaaaaataaataaataaaaaaaataaataaataaataaataaataat

SEQ ID NO: 14059 - RNA, 99 nt, synthetic construct
  source 1..99: mol_type = other RNA
aaataaatataaataaataaataaaaataaaaaaaaaaaaaaaaaaaaaaaaaaaaaataaataaataaaaaaaataaataaataaataaataaataat

SEQ ID NO: 14060 - RNA, 99 nt, synthetic construct
  source 1..99: mol_type = other RNA
aaataaatataaataaataaataaaaaaaaaaaaaaaaaaataaaaaaaaaaaaaaaataaataaataaaataaataaataaataaataaataaataat

SEQ ID NO: 14061 - RNA, 99 nt, synthetic construct
  source 1..99: mol_type = other RNA
aaataaatataaataaataaataaaaaaaaaaaaaaaaaaaaaaaaaaaaataaaaaataaataaataaaataaataaataaataaataaataaataat

SEQ ID NO: 14062 - RNA, 100 nt, synthetic construct
  source 1..100: mol_type = other RNA
aaaaaaaaaaaaataaatataaataaataaaaaaaaaaaaaaaaaaaaaaaaaaaaaaaaaaaaaaaaaaaaaaaataaataaaaaaaataaataaataa

SEQ ID NO: 14063 - RNA, 100 nt, synthetic construct
  source 1..100: mol_type = other RNA
aaaaaaaaaaaaataaatataaataaataaaaaaaaaaaaaaaaaaaaaaaaaaaaaaaaaaaaaaaaaaaaaaaataaataaaataaataaataaataa

SEQ ID NO: 14064 - RNA, 100 nt, synthetic construct
  source 1..100: mol_type = other RNA
aaaaaaaaaaaaataaatataaataaataaaaaaaaaaaaaaaaaaaaaaaaaaaaaaaaaaaaaaaaaaaataaataaataaaaaaaataaataaataa

SEQ ID NO: 14065 - RNA, 100 nt, synthetic construct
  source 1..100: mol_type = other RNA
aaatataaataaaaaaaaaaaaaaaaaaaaaaaaaaaaaaaaaaaaaaaaaaaaaaaaataaataaaaaaaaaaaaaaaaaaaaataaataaataatata

SEQ ID NO: 14066 - RNA, 100 nt, synthetic construct
  source 1..100: mol_type = other RNA
aaatataaataaaaaaaaaaaaaaaaaaaaaaaaaaaaaaaaaaaaaaaaaaaaataaataaataaaaaaaaaaaaaaaaaaaaataaataaataatata

SEQ ID NO: 14067 - RNA, 100 nt, synthetic construct
  source 1..100: mol_type = other RNA
aaatataaataaaaaaaaaaaaaaaaaaaaaaaaaaaaaaaaaaaaaaaaataaataaataaataaaaaaaaaaaaaaaaaaaaataaataaataatata

SEQ ID NO: 14068 - RNA, 100 nt, synthetic construct
  source 1..100: mol_type = other RNA
aaatataaataaaaaaaaaaaaaaaaaaaaaaaaaaaaaaaaaaaaaaaaataaataaataaataaataaaaaaaaaaaaaaaaataaataaataatata

SEQ ID NO: 14069 - RNA, 100 nt, synthetic construct
  source 1..100: mol_type = other RNA
aaatataaaaaaaaaaaaaaaaaaaaaaaaaaaaaaataaataaatataaataaataaaaaaaaaaaaaaaaaaaaaaaaaaaaaaaaataaaaaatata

SEQ ID NO: 14070 - RNA, 100 nt, synthetic construct
  source 1..100: mol_type = other RNA
aaaaaaaaaaaaataaatataaataaataaaaaaaaaaaaaaaaaaaaaaaaaaaaaaaaaaaaaaaaaaaaaaaataaataaaaaatataaataaataa

SEQ ID NO: 14071 - RNA, 100 nt, synthetic construct
  source 1..100: mol_type = other RNA
aaaaaaaataaataaataaaaaaaaaaaaaaaaaaaaaaaaaaaaaaaaaaaataaaaaaaaaaaatataaatataaataaataaataaataaatatata

SEQ ID NO: 14072 - RNA, 100 nt, synthetic construct
  source 1..100: mol_type = other RNA
aaatataaaaaaaaaaaaaaaaaaaaaaaaaaaaaaataaataaatataaataaataaaaaaaaaaaaaaaaaaaaaaaaaaaaaaaaataaataatata

SEQ ID NO: 14073 - RNA, 100 nt, synthetic construct
  source 1..100: mol_type = other RNA
aaaaaaaaaaaaatatatataaataaataaaaaaaaaaaaaaaaaaaaaaaaaaaaaaaaaaaaaaaaaaaaaaaataaataaaaaaaataaataaataa

SEQ ID NO: 14074 - RNA, 100 nt, synthetic construct
  source 1..100: mol_type = other RNA
aaaaaaaataaataaaaaaaaaaaaaaaaaaaaaaaaaaaaaaaaaaaaaaaataaaaaaaaaaaatataaatataaataaataaataaataaaaatata

SEQ ID NO: 14075 - RNA, 100 nt, synthetic construct
  source 1..100: mol_type = other RNA
aaaaaaaataaataaataaaaaaaaaaaaaaaaaaaaaaaaaaaaaaaaaaaataaaaaaaaaaaatataaatataaataaataaataaataaaaatata

SEQ ID NO: 14076 - RNA, 100 nt, synthetic construct
  source 1..100: mol_type = other RNA
aaaaaaaaaaaaataaatataaataaataaaaaaaaaaaaaaaaaaaaaaaaaaaaaaaaaaaaaataaaaaaaaataaataaaaaaaataaataaataa

SEQ ID NO: 14077 - RNA, 100 nt, synthetic construct
  source 1..100: mol_type = other RNA
aaaaaaaaaaaaataaataaatataaataaaaaaaaaaaaaaaaaaaaaaaaaaaaaaaaaaaaaataaaaaaaaataaataaaaaaaataaataaataa

SEQ ID NO: 14078 - RNA, 100 nt, synthetic construct
  source 1..100: mol_type = other RNA
aaaaaaaaaaaaataaatataaataaataaaaaaaaaaaaaaaataaaaaaaaaaaaaaaaaaaaaaaaaaaaaaataaataaaaaaaataaataaataa

SEQ ID NO: 14079 - RNA, 100 nt, synthetic construct
  source 1..100: mol_type = other RNA
aaaaataaaaaaataaatataaataaataaaaaaaaaaaaaaaaaaaaaaaaaaaaaaaaaaaaaaaaaaaaaaaataaataaaaaaaataaataaataa

SEQ ID NO: 14080 - RNA, 100 nt, synthetic construct
  source 1..100: mol_type = other RNA
aaaaaaaaaaaaataaatataaataaataaaaaaaaaaataaaaaaaaaaaaaaaaaaaaaaaaaaaaaaaaaaaataaataaaaaaaataaataaataa

SEQ ID NO: 14081 - RNA, 100 nt, synthetic construct
  source 1..100: mol_type = other RNA
aaaaaaaaaaaaataaatataaataaataaaaaaaaaaaaataaaaaaaaaaaaaaaaaaaaaaaaaaaaaaaaaataaataaaaaaaataaataaataa

SEQ ID NO: 14082 - RNA, 100 nt, synthetic construct
  source 1..100: mol_type = other RNA
aaaaaaaaaaaaataaatataaataaataaaaaaaaaaaaaaaaaaataaaaaaaaaaaaaaaaaaaaaaaaaaaataaataaaaaaaataaataaataa

SEQ ID NO: 14083 - RNA, 100 nt, synthetic construct
  source 1..100: mol_type = other RNA
aaaaaaaaaaaaataaatataaataaataaaaaaaaaaaataaaaaaaaaaaaaaaaaaaaaaaaaaaaaaaaaaataaataaaaaaaataaataaataa

SEQ ID NO: 14084 - RNA, 100 nt, synthetic construct
  source 1..100: mol_type = other RNA
aaatatatataaaaaaaaaaaaaaaaaaaaaaaaaaaaaaaaaaaaaaaaaaaaataaataaataaaaaaaaaaaaaaaaaaaaataaataaataatata

SEQ ID NO: 14085 - RNA, 100 nt, synthetic construct
  source 1..100: mol_type = other RNA
aaaaaaaaaaaaataaatataaataaataaaaaaaaaaaaaaaaaaaaaaaaaaaaaaaaaaaaaaaaaaaaaaaataaataaaaaaaataaataaatac

SEQ ID NO: 14086 - RNA, 100 nt, synthetic construct
  source 1..100: mol_type = other RNA
aaaaaaaaaaataaataaataaataaatataaaaaaaaaaaaaaaaaaaaaaaaaaaaaataataaaaaaaaaataaatataaataaataaataaatata

SEQ ID NO: 14087 - RNA, 100 nt, synthetic construct
  source 1..100: mol_type = other RNA
aaatataaataaaaaaaaaaaaaaaaaaaaaaaaaaaaaaaaaaaaaaaaaaaaaaaaataaataaaaaaaaaaaaataaaaaaataaataaataatata

SEQ ID NO: 14088 - RNA, 100 nt, synthetic construct
  source 1..100: mol_type = other RNA
aaatataaataaaaaaataaaaaaaaaaaaaaaaaaaaaaaaaaaaaaaaaaaaaaaaataaataaaaaaaaaaaaaaaaaaaaataaataaataatata

SEQ ID NO: 14089 - RNA, 100 nt, synthetic construct
  source 1..100: mol_type = other RNA
aaatataaataaaaaaaaaaaaaaaaaaaaaaaaaaaaaaaaaaaaaaataaaaaaaaataaataaaaaaaaaaaaaaaaaaaaataaataaataatata

SEQ ID NO: 14090 - RNA, 100 nt, synthetic construct
  source 1..100: mol_type = other RNA
aaatataaataaaaaaaaaaaaaaaaaaaaaaaaaaaaaaaaaaaaaaaaaaataaaaataaataaaaaaaaaaaaaaaaaaaaataaataaataatata

SEQ ID NO: 14091 - RNA, 100 nt, synthetic construct
  source 1..100: mol_type = other RNA
aaatataaataaaaaaaaaaaaaataaaaaaaaaaaaaaaaaaaaaaaaaaaaaataaataaataaaaaaaaaaaaaaaaaaaaataaataaataatata

SEQ ID NO: 14092 - RNA, 100 nt, synthetic construct
  source 1..100: mol_type = other RNA
aaatataaataaaaaaaaaaaaaaaaaaaaaaaaaaaaaaaaaaaaaaaaaaaaataaataaataaaaaaataaaaaaaaaaaaataaataaataatata

SEQ ID NO: 14093 - RNA, 100 nt, synthetic construct
  source 1..100: mol_type = other RNA
aaatataaataaaaaaaaaaaaaaaaaaaaaaaaaaaaaaaaaaaaaaaaaaaaataaataaataaaaaaaaaaataaaaaaaaataaataaataatata

SEQ ID NO: 14094 - RNA, 100 nt, synthetic construct
  source 1..100: mol_type = other RNA
aaatataaataaaaaaaaaaaaaaaaaaaaaaaataaaaaaaaaaaaaaaaaaaataaataaataaaaaaaaaaaaaaaaaaaaataaataaataatata

SEQ ID NO: 14095 - RNA, 100 nt, synthetic construct
  source 1..100: mol_type = other RNA
aaatataaataaaaaaaaaaaaaaaaaaaaaaaaaaaaaaaataaaaaaaaaaaataaataaataaaaaaaaaaaaaaaaaaaaataaataaataatata

SEQ ID NO: 14096 - RNA, 100 nt, synthetic construct
  source 1..100: mol_type = other RNA
aaatataaataaaaaaaaaaaaaaaaaaaaaaaaataaaaaaaaaaaaaaaaaaataaataaataaaaaaaaaaaaaaaaaaaaataaataaataatata

SEQ ID NO: 14097 - RNA, 100 nt, synthetic construct
  source 1..100: mol_type = other RNA
aaatataaataaaaaaaaaaaaaaaaaaaaaaaaaataaaaaaaaaaaaaataaataaataaataaaaaaaaaaaaaaaaaaaaataaataaataatata

SEQ ID NO: 14098 - RNA, 100 nt, synthetic construct
  source 1..100: mol_type = other RNA
aaatataaataaaaaaaaaaaaaaaaaaaaaataaaaaaaaaaaaaaaaaataaataaataaataaaaaaaaaaaaaaaaaaaaataaataaataatata

SEQ ID NO: 14099 - RNA, 100 nt, synthetic construct
  source 1..100: mol_type = other RNA
aaatataaataaaaaaaaaaaaaaaaaaaaaataaataaaaaaaaaaaaaataaataaataaataaaaaaaaaaaaaaaaaaaaataaataaataatata

SEQ ID NO: 14100 - RNA, 100 nt, synthetic construct
  source 1..100: mol_type = other RNA
aaatataaataaaaaaaaaaaaaaaaaaaaaataaaaaaaaaaaaaaaaaataaataaataaataaataaaaaaaaaaaaaaaaataaataaataatata

SEQ ID NO: 14101 - RNA, 100 nt, synthetic construct
  source 1..100: mol_type = other RNA
aaatataaataaaaaaaaaaaaaaaaaaaaaaaaaataaaaaaaaaaaaaataaataaataaataaataaaaaaaaaaaaaaaaataaataaataatata

SEQ ID NO: 14102 - RNA, 100 nt, synthetic construct
  source 1..100: mol_type = other RNA
aaatataaataaaaaaaaaaaaaaaaaaaaaataaataaaaaaaaaaaaaataaataaataaataaataaaaaaaaaaaaaaaaataaataaataatata

SEQ ID NO: 14103 - RNA, 100 nt, synthetic construct
  source 1..100: mol_type = other RNA
aaaaaaaaataaataaaaaaaataaataaaaaaaaaataaataaataaataaataaataaataaaaaaaataaataaataaaaaaaaaaaaaaaaatata

SEQ ID NO: 14104 - RNA, 100 nt, synthetic construct
  source 1..100: mol_type = other RNA
aaatataaaaaaaaaaaaaaaaaaaaaaaaaaaaaaataaataaatataaataaataaaaaaaaaaaaaaaaaaaaaaaaaataaaaaataaaaaatata

SEQ ID NO: 14105 - RNA, 100 nt, synthetic construct
  source 1..100: mol_type = other RNA
aaataaaataaataaaaaaaaaaaaaaaaaaaaaaaaaaaaaaaaaaaaaaaataaaaaaaaaaaatataaatataaataaataaataaataaaaatata

SEQ ID NO: 14106 - RNA, 100 nt, synthetic construct
  source 1..100: mol_type = other RNA
aaatataaataaaaaaaaaaaaaaaaaaaaaaaaaaaaaaaaaaaaaaaaaataataaataaataaaaaaaaaaaaaaaaaaaaataaataaataatata

SEQ ID NO: 14107 - RNA, 100 nt, synthetic construct
  source 1..100: mol_type = other RNA
aaatataaataaaaaaaaaaaaaaaaaaaaaaaaaaaaaaaaaaaaaaaaaaaaataaataaataaaaaaaaaaaaaaaaaataataaataaataatata

SEQ ID NO: 14108 - RNA, 100 nt, synthetic construct
  source 1..100: mol_type = other RNA
aaaaaaaaaaaaaaaaaaaaaaaaaaaaaaaaaaaaaataaataaataaaaaaaatataaataaataaataaaaaaaaaaataaaataaatataaataaa

SEQ ID NO: 14109 - RNA, 100 nt, synthetic construct
  source 1..100: mol_type = other RNA
aaatataaataaaaaaaaaaaaaaaaaaaaaataaaaaaaaaaaaaaaaaataaataaataaataaataaaaaaaaaaaaaaaaataaataaaatatata

SEQ ID NO: 14110 - RNA, 100 nt, synthetic construct
  source 1..100: mol_type = other RNA
aaatataaataaaaaaaaaaaaaaaaaaaaaataaataaaaaaaaaaaaaataaataaataaataaaaaaaaaaaaaaaaaataaataaaaaaatatata

SEQ ID NO: 14111 - RNA, 100 nt, synthetic construct
  source 1..100: mol_type = other RNA
aaatataaataaaaaaaaaaaaaaaaaaaaaataaataaaaaaaaaaaaaataaataaataaataaaaaaaaaaaaaaaaaaaaataaataaaatatata

SEQ ID NO: 14112 - RNA, 100 nt, synthetic construct
  source 1..100: mol_type = other RNA
aaatataaataaaaaaaaaaaaaaaaaaaaaaaaaataaaaaaaaaaaaaataaataaataaataaataaaaaaaaaaaaaaaaataaataaaatatata

SEQ ID NO: 14113 - RNA, 100 nt, synthetic construct
  source 1..100: mol_type = other RNA
aaatataaataaaaaaaaaaaaaaaaaaaaaataaataaaaaaaaaaaaaataaataaataaataaataaaaaaaaaaaaaaaaataaataaaatatata

SEQ ID NO: 14114 - RNA, 100 nt, synthetic construct
  source 1..100: mol_type = other RNA
aaatataaataaaaaaaaaaaaaaaaaaaaaataaataaaaaaaaaaaaaataaataaataaataaataaaaaaaaaaaaaataaataaaaaaatatata

SEQ ID NO: 14115 - RNA, 100 nt, synthetic construct
  source 1..100: mol_type = other RNA
aaataaataaataaaataaatataaataaataaaaaaaaaaaaaaaaaaaaaataaataaataaataaaaaaaaaaaaaaaaataaaaaaaaaatatata

SEQ ID NO: 14116 - RNA, 100 nt, synthetic construct
  source 1..100: mol_type = other RNA
aaaaaaaaaaaaaaaaaaaaaaaaaaaaaaaaaaaaaaaaaaaaaaaataaatataaataaaaaaataaaataataaataaataaataaataaataaata

SEQ ID NO: 14117 - RNA, 100 nt, synthetic construct
  source 1..100: mol_type = other RNA
aaatataaataaataaataaataaaaaaaaaaaaaaaaaaaaaaaaaaaaaaaaaaataaaaaaataaaaaaaataaataaataaaaaaaaaaaaaatat

SEQ ID NO: 14118 - RNA, 100 nt, synthetic construct
  source 1..100: mol_type = other RNA
aaatataaaaaaaaaaaaaaaaaaaaaaaaaaaaaaataaataaatataaataaataaaaaaaaaaaaaaaaaaaaaaaaaataaaaaataaataatata

SEQ ID NO: 14119 - RNA, 100 nt, synthetic construct
  source 1..100: mol_type = other RNA
aaatataaaaataaaaaaaaaaaaaaaaaaaaaaaaataaataaatataaataaataaaaaaaaaaaaaaaaaaaaaaaaaaaaaaaaataaataatata

SEQ ID NO: 14120 - RNA, 100 nt, synthetic construct
  source 1..100: mol_type = other RNA
aaatataaaaaaaaaaaaaaaaaaaaaaaaaaaaaaataaataaatataaataaataaaaaaaaaaaaaaaaaaaaaaaaaaataaaaataaataatata

SEQ ID NO: 14121 - RNA, 100 nt, synthetic construct
  source 1..100: mol_type = other RNA
aaatataaaaaaaaaataaaaaaaaaaaaaaaaaaaataaataaatataaataaataaaaaaaaaaaaaaaaaaaaaaaaaaaaaaaaataaataatata

SEQ ID NO: 14122 - RNA, 100 nt, synthetic construct
  source 1..100: mol_type = other RNA
aaatataaaaaaaaaaaaaaaaaaaaaaaaaaaaaaataaataaatataaataaataaaaaaaaaaaaaataaaaaaaaaaaaaaaaaataaataatata

SEQ ID NO: 14123 - RNA, 100 nt, synthetic construct
  source 1..100: mol_type = other RNA
aaatataaaaaaaaaaaaaaaaaaaaaaaaaaaaaaataaataaatataaataaataaaaaaaaaaaaaaaaaaaataaaaaaaaaaaataaataatata

SEQ ID NO: 14124 - RNA, 100 nt, synthetic construct
  source 1..100: mol_type = other RNA
aaaaaaaataaataaaaaaaaaaaaaaaaaaaaaaaaaaaaaaaaaaaaaaaataaaaaaaaaaaatataaaaataaataaataaataaataaaaatata

SEQ ID NO: 14125 - RNA, 100 nt, synthetic construct
  source 1..100: mol_type = other RNA
aaatataaataaaaaaaaaaaaaaaaaaaaaaatataaaaaaaaaaaaaaataaataaataaataaaaaaaaaaaaaaaaaaaaataaataaataatata

SEQ ID NO: 14126 - RNA, 100 nt, synthetic construct
  source 1..100: mol_type = other RNA
aaatataaataaaaaaaaaaaaaaaaaaaatataaaaaaaaaaaaaaaaaataaataaataaataaaaaaaaaaaaaaaaaaaaataaataaataatata

SEQ ID NO: 14127 - RNA, 100 nt, synthetic construct
  source 1..100: mol_type = other RNA
aaatataaataaaaaaaaaaaaaaaaaaaaaaatataaaaaaaaaaaaaaataaataaataaataaataaaaaaaaaaaaaaaaataaataaataatata

SEQ ID NO: 14128 - RNA, 100 nt, synthetic construct
  source 1..100: mol_type = other RNA
aaatataaataaaaaaaaaaaaaaaaaaaatataaataaaaaaaaaaaaaataaataaataaataaaaaaaaaaaaaaaaaaaaataaataaataatata

SEQ ID NO: 14129 - RNA, 100 nt, synthetic construct
  source 1..100: mol_type = other RNA
aaatataaatataaaaaaaaaaaaaaaaaaaaaaaataaaaaaaaaaaaaataaataaataaataaataaaaaaaaaaaaaaaaataaataaataatata

SEQ ID NO: 14130 - RNA, 100 nt, synthetic construct
  source 1..100: mol_type = other RNA
aaatataaataaaaaaaaaaaaaaaaaaaatataaataaaaaaaaaaaaaataaataaataaataaataaaaaaaaaaaaaaaaataaataaataatata

SEQ ID NO: 14131 - RNA, 100 nt, synthetic construct
  source 1..100: mol_type = other RNA
aaatataaataaaaaaaaaaaaaaaaaaaaaataaatataaaaaaaaaaaataaataaataaataaataaaaaaaaaaaaaaaaataaataaataatata

SEQ ID NO: 14132 - RNA, 100 nt, synthetic construct
  source 1..100: mol_type = other RNA
aaatataaataaaaaaaaaaaaaaaaaaataaatataaaaaaaaaaaaaaataaataaataaataaataaaaaaaaaaaaaaaaataaataaataatata

SEQ ID NO: 14133 - RNA, 100 nt, synthetic construct
  source 1..100: mol_type = other RNA
aaatataaatataaaaaaaaaaaaaaaaaaaataaataaaaaaaaaaaaaataaataaataaataaataaaaaaaaaaaaaaaaataaataaataatata

SEQ ID NO: 14134 - RNA, 100 nt, synthetic construct
  source 1..100: mol_type = other RNA
aaaaaaaaataaataaaaaaaataaataaaaaaaatataaataaataaataaataaataaataaaaaaaataaataaataaaaaaaaaaaaaaaaatata

SEQ ID NO: 14135 - RNA, 100 nt, synthetic construct
  source 1..100: mol_type = other RNA
aaaaaaaaataaataaaaaaaataaataaaaaaaatataaataaataaataaataaataaataaataaaataaataaataaaaaaaaaaaaaaaaatata

SEQ ID NO: 14136 - RNA, 100 nt, synthetic construct
  source 1..100: mol_type = other RNA
taaaaaaaaaaaaaaaaaaaaaaaaaaataaataaaaaaaaaaaaaaaaaaaaaaaataaataaatataaaaaaaaaaaaaaaaaaaaaaaaataaatat

SEQ ID NO: 14137 - RNA, 100 nt, synthetic construct
  source 1..100: mol_type = other RNA
aaaaaaaaataaataaataaaataaataaaaaaaatataaataaataaataaataaataaataaataaaataaataaataaaaaaaaaaaaaaaaatata

SEQ ID NO: 14138 - RNA, 100 nt, synthetic construct
  source 1..100: mol_type = other RNA
aaaaaaaaataaataaaataaataaataaaaaaaatataaataaataaataaataaataaataaataaaataaataaataaaaaaaaaaaaaaaaatata

SEQ ID NO: 14139 - RNA, 100 nt, synthetic construct
  source 1..100: mol_type = other RNA
aaaaaaaaataaataaaaaaaataaataaataaaatataaataaataaataaataaataaataaataaaataaataaataaaaaaaaaaaaaaaaatata

SEQ ID NO: 14140 - RNA, 100 nt, synthetic construct
  source 1..100: mol_type = other RNA
aaaaaaaaataaataaataaaataaataaaaaaaatataaataaataaataaataaataaataaataaaataaataaataaataaaaaaaaaaaaatata

SEQ ID NO: 14141 - RNA, 100 nt, synthetic construct
  source 1..100: mol_type = other RNA
aaaaaaaaataaataaaataaataaataaataaaatataaataaataaataaataaataaataaataaaataaataaataaaaaaaaaaaaaaaaatata

SEQ ID NO: 14142 - RNA, 100 nt, synthetic construct
  source 1..100: mol_type = other RNA
aaaaaaaaataaataaaataaataaataaaaaaaatataaataaataaataaataaataaataaataaaataaataaataaataaaaaaaaaaaaatata

SEQ ID NO: 14143 - RNA, 100 nt, synthetic construct
  source 1..100: mol_type = other RNA
aaaaaaaaataaataaataaaataaataaataaaatataaataaataaataaataaataaataaataaaataaataaataaaaaaaaaaaaaaaaatata

SEQ ID NO: 14144 - RNA, 100 nt, synthetic construct
  source 1..100: mol_type = other RNA
aaaaaaaaaaaaaaaaaaaaaaaataaataaataaaaaaaaaaaaaaaaaaaaaaaaaaaaaataaaataaaataaataaataaataaaaaaaatatata

SEQ ID NO: 14145 - RNA, 100 nt, synthetic construct
  source 1..100: mol_type = other RNA
aaaaaaaaataaataaataaaataaataaataaaatataaataaataaataaataaataaataaataaaataaataaataaataaaaaaaaaaaaatata

SEQ ID NO: 14146 - RNA, 100 nt, synthetic construct
  source 1..100: mol_type = other RNA
aaaaaaaaataaataaaataaataaataaataaaatataaataaataaataaataaataaataaataaaataaataaataaataaaaaaaaaaaaatata

SEQ ID NO: 14147 - RNA, 100 nt, synthetic construct
  source 1..100: mol_type = other RNA
aaaaaaaaaaaaataaataaaaataaataaaaaaaaaaaaaaaaaaaaaaaaaaaaaaaaaaaaaataaaaaaaaataaataaaaaaaataaataaataa

SEQ ID NO: 14148 - RNA, 100 nt, synthetic construct
  source 1..100: mol_type = other RNA
aaaaaaaataaatataaataaataaaatataaataaatataaatataaataaataaataaaaaaaaaaaaaaaaaaaaaaaataaaaataaataaatata

SEQ ID NO: 14149 - RNA, 100 nt, synthetic construct
  source 1..100: mol_type = other RNA
aaaaaaaataaataaaaaaaaaaaaaaaaaaaaaaaaaaaaaaaaaaaaaaaataaaaaaaaaaaatataaatataaatatataaataaataaaaatata

SEQ ID NO: 14150 - RNA, 100 nt, synthetic construct
  source 1..100: mol_type = other RNA
aaatataaataaaaaaaaaaaaaaaaaaaaaaatataaaaaaaaaaaaaaataaataaataaataaaaaaaaaaaaaaaaaaaaataaataaaatatata

SEQ ID NO: 14151 - RNA, 100 nt, synthetic construct
  source 1..100: mol_type = other RNA
aaatataaataaaaaaaaaaaaaaaaaaaaaaatataaaaaaaaaaaaaaataaataaataaataaataaaaaaaaaaaaaaaaataaataaaatatata

SEQ ID NO: 14152 - RNA, 100 nt, synthetic construct
  source 1..100: mol_type = other RNA
aaatataaataaaaaaaaaaaaaaaaaaaaaaatataaaaaaaaaaaaaaataaataaataaataaataaaaaaaaaaaaaataaataaaaaaatatata

SEQ ID NO: 14153 - RNA, 100 nt, synthetic construct
  source 1..100: mol_type = other RNA
aaatataaataaaaaaaaaaaaaaaaaaaatataaataaaaaaaaaaaaaataaataaataaataaaaaaaaaaaaaaaaaaaaataaataaaatatata

SEQ ID NO: 14154 - RNA, 100 nt, synthetic construct
  source 1..100: mol_type = other RNA
aaatataaaaaaaaaaaaaaaaaaaaaaaaaaaaaaataaataaatataaataaataaaaaaaaaaaaaaaaaaaaaaaaaataaataataaataatata

SEQ ID NO: 14155 - RNA, 100 nt, synthetic construct
  source 1..100: mol_type = other RNA
aaatataaataaaaaaaaaaaaaaaaaaaatataaataaaaaaaaaaaaaataaataaataaataaataaaaaaaaaaaaaaaaataaataaaatatata

SEQ ID NO: 14156 - RNA, 100 nt, synthetic construct
  source 1..100: mol_type = other RNA
aaatataaataaaaaaaaaaaaaaaaaaaatataaataaaaaaaaaaaaaataaataaataaataaataaaaaaaaaaaaaataaataaaaaaatatata

SEQ ID NO: 14157 - RNA, 100 nt, synthetic construct
  source 1..100: mol_type = other RNA
aaatataaatataaaaaaaaaaaaaaaaaaaataaataaaaaaaaaaaaaataaataaataaataaataaaaaaaaaaaaaaaaataaataaaatatata

SEQ ID NO: 14158 - RNA, 100 nt, synthetic construct
  source 1..100: mol_type = other RNA
aaatataaataaaaaaaaaaaaaaaaaaataaatataaaaaaaaaaaaaaataaataaataaataaataaaaaaaaaaaaaataaataaaaaaatatata

SEQ ID NO: 14159 - RNA, 100 nt, synthetic construct
  source 1..100: mol_type = other RNA
aaaaaaaaaaaaataaatataaataaataaaaaaaaaaaaaaaaaaaaaaaaaaaaaaaaaaaaaataaaaaaaaataaataaaaaaaatatataaataa

SEQ ID NO: 14160 - RNA, 100 nt, synthetic construct
  source 1..100: mol_type = other RNA
aaaaaaaaaaataaataaataaataaatataaaaaaaaaaaaaaaaaaaaaaaaaaataaaaataaaaaaaaaataaatatatataaataaataaatata

SEQ ID NO: 14161 - RNA, 100 nt, synthetic construct
  source 1..100: mol_type = other RNA
aaataaaaaaaaaaaaaaaaaaaaaaaaaaaaaaaaaataaataaataaaaaaaatataaataaataaataaaaaaaaaaataaaataaatataaataaa

SEQ ID NO: 14162 - RNA, 1411 nt, synthetic construct
  source 1..1411: mol_type = other RNA
aaaaacaaaaaacaaaaaaaacaaaaaaaaaaccaaaaaaacaaaacacaagttgcaagaaacgcggtttgaaaataaagaacgttggcccttccataaggaatggaagagatgttttgaaagggggtctgggggtttttccccagaccccgggcccgccgctcaggcgggttactgtgtcatccatacacacctttccgtgtagcgcacgtaaaatgctaggcccgtaataggccgactggctttgccagtgattccccttgcgggatctttgttctttattttcaaaccgcgtttcttgcaactttgaatcaacaagaacgttggcccttccataaggaatggaagagatgtatttgaaatggaggtacactattgtaatgtcaatgaccttaccatccgctgtgatgggctcactcctgtacaccgtgagtccgcgcagtgctgacttaacacttaagtaatgtttaggccgagaattacaccgctcggctcccacctttcaccaccgtgggattaacaggtggtcaatctgtattcctgtctttggttatgtcaaagcaatacggcatgtgcaatggcgcacaggcccaaggcggagatctagacctcacagattgtgttacagattaagaccatgctggatggtcacgttggagactgcatgtggcagtcttgaaacgtgtggtttgacgtctaaccattatagcagtgggtggagtactgcaaagatgtcaccgtgctttacacggtttttgaaccccacaccggctgtttggcacttgcaggacagtaggtttattttctttcagatctcttttctagtcgtgcatgttctgtatgcacgagcggagtgatactcccgctccttcttggacaggcggcctccacgtcctttgtggaactcaaggttgccaagtcactggtgtttgaagtgaagattagagaaacactagggagtttcatgtggctttgccagggattgtagcgatgctgtgtgtgtgtgcggaatccccctcgtggcgacacgagcctcacaggccaaaagccctgtccgaaaggacccacacagtggggcacccccagcccctccctacaaagctttgtgcaaatgaacttttgtttggcttttcttaagcttctctcacatcaggccccaaagatgtcctgaaggtaccccgtgtatctgaggatgagcaccatcgactacccggacttgtgagccttttcacagacgcatgtggtacccaagccccttccctacggggaaggggctttgctcactcagcacaggatctgatcaggagatctgtctccggtgctttacaccggggcacagatttaaaaatttcccaaggcctggcacacaacctaggggactaggttttccttttatcacaaagatgtcaat

SEQ ID NO: 14163 - RNA, 1210 nt, synthetic construct
  source 1..1210: mol_type = other RNA
aaaaacaaaaaacaaaaaaaacaaaaaaaaaaccaaaaaaacaaaattctgagaccggcacggtcaacccgactcatttacgagttactcatttattttgaaacatcataaagaacgtgaaccgctctttgtttctttaaggaatttagagtagaaaacatttgagatgaggcccggttgaactccgggcgctttccatccgctgtgatgggctcactcctgtacaccgtgagtccgcgcagtgctgacttaacacttaagtaatgtataggccgaggattacaccgctcggctcccacctttcaccaccgtgggattaacaggttcaatgcacaaattcctgtccttggctatgtcaaagcaatacagtgtgtacatggcgtgcacgctcaaagcggagacttaggcctcacagattgtgttttgtgttattggatgctggatggtcacgttggagactgcatgtggcagtcttgaaacgtgtggtttgacgtctatccattatggcagtgggtggagtactgcaaagatgtcaccgtgctttacacggtttttgaaccccacaccggctgtttggcgcttgcaggacagcaggtttattttcttatgttctccatttctagccaacagggttctatcctgttgggcggagtgatactcccgttccttcttggacagattgcctccacgttctttgtggatctcaaggtgatcaagtcactggtgaatagagcgaaggttgaggagacctgaggaatttccatgtggctttgccaggagttgtagcgatgctgtgtgtgtgtgcggatttcccctcatggcaacatgagcctcacaggccaaaagccctgtccgaaaggacccacacagtggagcaaccccagctccctcctacaaagctttgtgagaatgaactcaagtttattctactttattctctatttacatcaggccccaaagatgtcctgaaggtaccttgtgtatctgggcacgagcaccatcagctacccggacttgtatttcggtacagacacatgtggtgacccagcccctctgcttcggcaggggggctttcgctcgctcagcacgagatctgatcaggagcccctcccagtgtgctttacacctggcgaggggttaaaaattgcccaaggcctggcaaaacaacctaggggactaggttttccttttattaataatatctgtcatt

SEQ ID NO: 14164 - RNA, 1086 nt, synthetic construct
  source 1..1086: mol_type = other RNA
aaaaacaaaaaacaaaaaaaacaaaaaaaaaaccaaaaaaacaaaatcaaagggggccctggggtcttcatcgcggagatgcgttagcatcttcgcggtgtagaacaccccaggggtaccccctttgaacgcgggacctgcgacagtgccaacccacgtcttttcccacttctgccccgattctcacctcgggtccaatgaaaggaccaaatatttcatcccttgagtgctggctaatcagaggaaagtcagcattttccggcccaggctaagagaaacatataagttagatttgattctgatcccttgacgaattcggaacgagacgttctccctcccttgccacttgttcacacccacattttgattcggccttttgtgacaagtcccttggtgaaagaacctctctctttccgacgtggttggaattaacatcatttccgacgaaagtgctatcatgcctccccgattgtgtgatgttttctgccctgctgggcggagcattctcgggttgagaaaccttgaatcttttcctttggaaccttggttcccccggtctaagccgcttggaatatgacagggttattttccttattcttatttctacttttatgggttctatccataaaaagggtatgtgctgccccttccttctttggagaattcacacggcggcctttccgtctctcgacaagtgtgaatgcagcatgccggaaacggtgaagaaaacagttttctgtggaagttcagagtgcacatcgaaacagctgtagcgacctcacagtagcagcggaaccccctcttggcgacaagagcctctgcggccaaaagccccgtggataagatccactgctgtgagcggtgcaaccccagcaccctgattcgatggtcactctttacggaaccagaaaatggttttctcaagcccttcggtagagaagccaagaatgtcctgaaggtaccccgcgtgcgggatctgatcaggagaccaattgacagtgctatacgctgtcactttggtttaaaaactgtcacagcttctccaaaccaagtggtcttggttttccaattttgttgactggcaat

SEQ ID NO: 14165 - RNA, 874 nt, synthetic construct
  source 1..874: mol_type = other RNA
aaaaacaaaaaacaaaaaaaacaaaaaaaaaaccaaaaaaacaaaattttcaaagccggggttgggggggctgcaccccatccccccttcttcccctcttcctccgttgcgcgcgttcctgacgcccgccgcggagttcctagctggctaacacccagttgggagggctctcactccctcacacctcgcgctttggacgccaggcatggcgttaaacatgcattcccttcccctagtaacctcccttcgccccttccccacgttgtaccccctccgagatggctgctaaggcgcttgctgctacagcagtctcgtgtttcgggtgttataagtgctttcttttccactccactccctgcctatggggagcggaacggccttgtctcggtcgttgcttcttgcagatcttcacccctccaggctttctggactcgccaggggtggagtagtaggcgcactgtctaagtgaaggtagcagtgttgttggcgaagagttgtggacctactttgagtttgtagcgatcatccagagctagcggatctccccacgcggtaacgcgtgcctctaggcccaaaaggcacggtgttcacagcaccctttggatggcgggggtgcccccctccgcacttaaagtagaaaaacagcttagtagtcaaataacatggctttcctcaagcattcagtgctacatgggactgaaggatgcccagaaggtacccgcaggcaacgataagctcactgtggatctgatctggggccctgggccaggtgctatacacctggttaaaaccaaatctggtagtcagggttaaaaaacgtctaagtcccacccccccggggacggggggttcccttaaaccctcaactgacacc

SEQ ID NO: 14166 - RNA, 805 nt, synthetic construct
  source 1..805: mol_type = other RNA
aaaaacaaaaaacaaaaaaaacaaaaaaaaaaccaaaaaaacaaaaacatgggggagactgcatgtggcagtcttgaaacgtgtggtttgacgtctaccttatatggcagtgggtggagtactgcaaagatgtcaccgtgctttacacggtttttgaaccccacaccggctgtttgacgctcgtagggcagcaggtttattttcattaaaattcttactttctagctgcatgagttctattcatgcagacggagtgatactcccgttccttcttggacaggttgcctccacgccctttgtggatcttaaggtgaccaagtcactggtgttggaggtgaagatagagagtcctcttgggaatgtcatgtggctgtgccaggggttgtagcgatgccattcgtgtgtgcggatttcctctcgtggtgacacgagcctcacaggccaaaagccccgtccgaaaggacccgaatggtggagtgaccctgactcccccctgcatagttttgtgattaggaacttgaggaatttctgtcataaatctctatcacatcaggccccaaagatgtcctgaaggtaccctgtgtatctgaggatgagcaccaccgactacccggacttgcattagcagacacatgtggttgcccagccccacctcttcagaggtggggctttgctcactcagcacaggatctgatcaggagccccgctcgtgtgctttacactcgacgcggggttaaaaattgcccaaggcctggcacaacaacctaggggactaggttttcctatttttgtaaattatgtcaat

SEQ ID NO: 14167 - RNA, 795 nt, synthetic construct
  source 1..795: mol_type = other RNA
aaaaacaaaaaacaaaaaaaacaaaaaaaaaaccaaaaaaacaaaattgccagttttttgaaacgtgtggtttgacgtctaaccattatggcagtgggtggagtactgcaaagatgtcaccgtgctttacacggtttttgaaccccacaccggctgtttggcgcttgcaggacagcaggtttattttcttttaactctctctttctagccacacacgatctatgtgtgtgggcggagtgatactcccgttccttcttggacaggcggcctccacgccctttgtggatcttaaggctaccaagtcactggtgttggaaagtgaagagaaaggagttccttgggaactacatgtggcattgacagaggttgtagcgatgctgtgtgtgtgtgcggattacccccgtggcgacacggaccccacaggccaaaagccctgtccgaaaggacccacacagtggagcaaccccagctcccctcttcaatgttttgtgttagcaaccttggtattattttctctcaagcttccaatacaccgggccccaaagatgtcctgaaggtaccccgtgtatctgaggatgagcaccatcaactacccggacttgttctttcgagaacagacgcatgtggtaacccagccccgatcctaaggggtcggggcttttgctcactcagcacaggatctgatcaggagacctcccccccctgctttacagggggcgggggtttaaaaattgcccaaggcctggcaaataacctaggggactaggttttcctttttattttaaagttgtcaat

SEQ ID NO: 14168 - RNA, 794 nt, synthetic construct
  source 1..794: mol_type = other RNA
aaaaacaaaaaacaaaaaaaacaaaaaaaaaaccaaaaaaacaaaattaaaacagcttgtgggttgcacccacccacagggcccactgggcgctagcacactgattctacggaatctttgtgcgcctgttttataaccccttcccccaaaactgtaacttagaagaatattacactactgatcaatagcaggcatggcgcgccagtcatgtctagatcaagcacttctgtctccccggactgagtatcaatagactgctagcgcggttgaaggagaaaacgtccgttacccggctaactacttcgagaaacttagtagcaccattgaagctgcggagtgtttcgttcagcactcccccagtgtagatcaggtcgatgagtcactgcactccccacgggcgaccgtggcagtgactgcgttggcggcctgcctatggggcaacccataggacgctctaaagtggacatggtgcgaagagtctattgagctagttagtagtcctccggcccctgaatgcggctaatcccaactgcggagcacatgccctcaatccagagggtggtgtgtcgtaacgggcaactctgcagcggaaccgactactttgggtgtccgtgtttccttttattcttatattggctgcttatggtgacaattgagagattgttaccatatagctattggattggccatccagtgacaaacagagctttgatatacttgtttgtgggttttgttccacttaccagtcgtacagttcatactctaaagtacattctgattctgaacaatagaaa

SEQ ID NO: 14169 - RNA, 794 nt, synthetic construct
  source 1..794: mol_type = other RNA
aaaaacaaaaaacaaaaaaaacaaaaaaaaaaccaaaaaaacaaaattaaaacagctctggggttgttcccaccccagaggcccacgtggcggccagtacaccggtatcgcggtacccttgtacgcctgttttatactccctttccccgtaacttagaagcaatgaaaccaagttcaatagaaagggggtacaaaccagtaccaccacgaacaagcacttctgtctccccggtgaggtcgtatagactgttcccacggttgaaaatgactgatccgttatccgctcttgtacttcgagaagcctagtaccaccttggaatcttcgatgcgttgcgctcagcactcaaccccggagtgtagcttgggctgatgagtctggacattccccaccggcgacggtggtccaggctgcgttggcggcctacctgtggcccaaagccacaggacgctagttgtgaacaaggtgtgaagagcctattgagctacatgagagtcctccggcccctgaatgcggctaatcccaaccacggagcaggcgattgcaatccagcaattagcctgtcgtaacgcgtaagtctgtggcggaaccgactactttgggtgaccgtgtttccttttattcttacattggctgcttatggtgacaatcatagattgttatcataaagcgagttggattggccatccagtgagaattagatcgatcatctacctttttgttggatttacacctttaaaaccacacagcttgaatctcatcaaaattgtattgttgatacgacattattatcatt

SEQ ID NO: 14170 - RNA, 793 nt, synthetic construct
  source 1..793: mol_type = other RNA
aaaaacaaaaaacaaaaaaaacaaaaaaaaaaccaaaaaaacaaaatggcagtccttgaaacgtgtggtgcgacgtctaaccattatggcagtgggtggagtactgcaaagatgtcaccgtgctttacacggtttttgaaccccacaccggctgtttggcgcttgcaggacagtaggtatattttctttcatttctcttttctagccgcgtaggttctatctacgcgggcggagtgatactcccgctccttcttggacaggcggcctccacgctctttgtggatcttaaggctgccaagtcactggtgtttgaagtgaagaatggagagacactagggcgtttcatgtggctttgccagggattgtagcgatgctgtgtgtgtgtgcggatttcccctcgtggcgacacgagcctcacaggccaaaagccctgtccgaaaggacccacacagtggggttgccccgacccctcccttcaaagctttgtgtaaacaaacttttgtttagactttcttaagcttctctcacatcaggccccaaagatgtcctgaaggtaccctgtgtatctgaggatgagcaccaccaactacccggacttgtgggacgtgtcccacagacgcatgtggtattccagccccctccttttgaggagggggcttttgctcgctcagcacaggatctgatcaggagattcatctctggtgctttacaccagagcatggatttaaaaattgcccaaggcctggcaaacaacctaggggactaggttttctctattttaaaagatgtcaat

SEQ ID NO: 14171 - RNA, 793 nt, synthetic construct
  source 1..793: mol_type = other RNA
aaaaacaaaaaacaaaaaaaacaaaaaaaaaaccaaaaaaacaaaattaaaacagcctgtgggttgttcccacccacagggcccactgggcgctagcactctggttctccggaacctttgtgcgcctgttttgaaaccccctcccccaactcgaaacgtagaagtaatgtacactactgatcagtagcaggcgtggcgcaccagccatgtctcgatcaagcacttctgtttccccggactgagtatcaatagactgctcacgcggttgaaggtgaaaacgtccgttacccggctaactacttcgagaaacctagtagcaccatagaaactgcagagtgtttcgctcagcacttcccccgtgtagatcaggtcgatgagtcactgcaatccccacgggtgaccgtggcagtggctgcgttggcggcctgcctatggggcaacccataggacgctctaaggtggacatggtgtgaagagtctattgagctagttagtagtcctccggcccctgaatgcggctaatcctaactgtggagcgcatactcccaaaccagggagcagtgcgtcgtaacgggcaactccgcagcggaaccgactactttgggtgtccgtgtttccttttattcctatactggctgcttatggtgacaattgagagattgttaccatatagctattggattggccatccagtgtgtaatagagcaatcatttaccaatttgttggatttactccattaacccacacgtctctcaacacactacatttcatcttactactgaacactagaaa

SEQ ID NO: 14172 - RNA, 793 nt, synthetic construct
  source 1..793: mol_type = other RNA
aaaaacaaaaaacaaaaaaaacaaaaaaaaaaccaaaaaaacaaaatttaaaacagcctgtgggttgtacccacccacagggcccactgggcgttagcacactgattctacggaatctttgtgcgcctgttttatatccctcccctaaaatagtaatttagacgttgaacatttacacgaccaatagtgggcgtggcgcaccagtcacgtcttggtcaagcactcctgttcccccggaccgagtatcaataggctgctcacgtggctgaaggagaaagtgttcgttatccggctaactacttcgggaaacccagtaacaccatgaaagttgcagagtgtttcgttcagcacttcccccgtgtagatcaggctgatgagtcactgcaaaccccacgggcgaccgtggcagtggctgcgttggcggcctgcctatggggtaacccataggacgctctaatacagacatggtgcgaagagtctactgagctagttagtattcctccggcccctgaatgcggctaatcctaactgcggagcacatgccctcaatccagagggtggtgtgtcgtaatgggcaactctgcagcggaaccgactactttgggtgtccgtgtttccttttattcttatactggctgcttatggtgacaattgaaaagttgttaccatatagctattggattggccatccggtgaataacagagctttggtttatcagttcattgggttcgtgcccttatcatctacagcttacacaactttggtgtacttgttatatcttaatagtaagaa

SEQ ID NO: 14173 - RNA, 793 nt, synthetic construct
  source 1..793: mol_type = other RNA
aaaaacaaaaaacaaaaaaaacaaaaaaaaaaccaaaaaaacaaaattaaaacagcctgtgggttgtacccacccacagggcccactgggcgctagcacactggtatcacggtacctttgtgcgcctgttttatgcaccctttttccctgtaactcagaagaaacaaacaaacgatcaatagtgggcttagcgctccagctaagtcttgatcaagcacttctgttaccccggaccgagtatcaataggctgtacccacggctgaaagagaaaacgttcgttatccggctatctacttcgggaaacctagtaccatcatgaagattgcaaagcgtttcgctcagcacaaccccagtgtagatcaggtcgatgagtcactgcattccccacaggtgactgtggcagtggctgcgttggcggcctgcctatggggaaacccataggacgctttaatattgacatggtgcgaagagtctactgagctaggtagtagtcctccggcccctgaatgcggctaatcccaaccacggagcaggcgctcacactccagtgagtagcttgtcgtaacgcgaaagtctgtggcggaaccgactactttgggtgtccgtgtttccttttatttttatcatggctgcttatggtgacaatctaagattgttatcatatagctattggattggccatccggtgaattctagagacattatttacttgtttgttggttttaccacactgaacattaccaatcacagaactctcctttacatcttgttgttaaacaatagaaagagaaa

SEQ ID NO: 14174 - RNA, 792 nt, synthetic construct
  source 1..792: mol_type = other RNA
aaaaacaaaaaacaaaaaaaacaaaaaaaaaaccaaaaaaacaaaatttaaaacagcctgtgggttgtacccacctacagggcccactgggcgctagcactctgattccacggaatccttgtgcgcctgttttatatcccctccccaagttgcaacttagaagcattgcactacaatgatcagtagcaggcgtggcgctccagccatgtctcgatcaagcacttctgtttccccggaccgagtatcaatagactgctaacgcggttgaaggagaaaacgttcgttatccggctaactacttcgagaaacctagtagcaccatcgaagctgcggggcgtttcgctcagcacttcccccgtgtagatcaggtcgatgagtcactgcaatcctcacgggcgaccgtggcagtggctgcgttggcggcctgcctatggggcaacccataggacgcttcaaagtggacatggtgtgaagagtctattgagctagttagtagtcctccggcccctgaatgcggctaatcctaactgcggagcacataccttcaatccaggaggtagtgtgtcgtaacgggcaactctgcagcggaaccgactactttgggtgtccgtgtttccttttattctcttattggctgcttatggtgacaattgaagaattgttaccatatagctattggattggccatccagtgtctaacagagcaattgtgtacttatttgttggttttgttcctttgtctcacacgtcccttagtactttgtattacattataaaactgaattcggagag

SEQ ID NO: 14175 - RNA, 791 nt, synthetic construct
  source 1..791: mol_type = other RNA
aaaaacaaaaaacaaaaaaaacaaaaaaaaaaccaaaaaaacaaaatttaaaacagcctgtgggttgttcccacccacagggcccactgggcgccagcactctggtattgcggtaccttagtgcgcctgttttatatacccatcccccaaacgtgatttagatgcatgttaacgaagaccaatagtaagcgcagcacaccagctgtgttccggtcaagcacttctgttaccccggactgagtatcaataagctactcacgtggctgaaggagaaaacgttcgttacccggccaattacttcgagaaacccagtaacaccatgaaggttgcgcagtgtttcgctccgcacaaccccagtgtagatcaggtcgatgagtcaccgcattccccacgggtgaccgtggcggtggctgcactggcggcctgcccatggggtaacccatgggacgcttcaatactgacatggtgcgaagagtctattgagctaattggtagtcctccggcccctgaatgcggctaatcctaactgcggagcagatactcacataccagtgggcggtctgtcgtaacgggcaactctgcagcggaaccgactactttgggtgtccgtgtttctctttatccttatactggctgcttatggtgacaattgggagattgttaccatatagctattggattggccatccagtgacaaatagagcaatcgtgtatttgtttgttggtttcgtaccattaaattacaaggtcataaacaccctcaatcttattatagcattcaatacaacaaa

SEQ ID NO: 14176 - RNA, 790 nt, synthetic construct
  source 1..790: mol_type = other RNA
aaaaacaaaaaacaaaaaaaacaaaaaaaaaaccaaaaaaacaaaattaaaacagctctggggttgtccccacccacagggcccactgggcgctagcacactggttctgcgggacctttgtgcgcctgttttataacccttccctaagcagtaacttagaagctttgtacaatcatggccaatagtgggcgtggcgcgccagtcacgtcttggtcaagcacttctgtatccccggactgagtatcaatagactgctcacgcggttgaaggagaaaacgttcgttacccggctaactacttcgagaaacctagtagcaccatgaaagttgcggagtgtttcgctcagcacttcccccgtgtagatcaggtcgatgagccactgtaaaccccacgggcgaccgtgacagtggctgcgttggcggcctgcccatggggtaacccatgggacgctctaatacagacatggtgcgaagagtctattgagctagttagcagtcctccggcccctgaatgcggctaatcctaactgcggagcgcgcaccttcaacccagggggcggcgcgtcgtaatgggtaactctgcagcggaaccgactactttgggtgtccgtgtttccttttattctttattggctgcttatggtgacaattgaaaagttgttaccatatagctattggattggccatccggtgtctaacagagctattgtttacctattcattggctttgtccctcttaatctcaaggccatccaaactctcgattacatattgctcctcagctgtaagaa

SEQ ID NO: 14177 - RNA, 790 nt, synthetic construct
  source 1..790: mol_type = other RNA
aaaaacaaaaaacaaaaaaaacaaaaaaaaaaccaaaaaaacaaaattaaaccagcctgtgggttgttcccacccacagggcccactgggcgctagcacactggtatcccggtacctttgtgcgcctgttttaatcaccccccccccaaacgtaacttagaagtttataactcatggtcaataggcgactcagcataccagctgggtcttgaccaagcactcctgtaaccccggaccgagtatcaataggctgtttgcacggctgaaggagaaaacgtccgttatccgaccaattacttcgagaaacctagtaccaccgtgaaggttgcgcagtgtttcgctccgcacaaccccagtgtagatcaggtcgatgagtcaccgcactcctcacgggcgaccgtggcggtggctgcgctggcggcctgcccatggggcaacccatgggacgcttcaatactgacatggtgtgaagagtctattgagctaattggtagtcctccggcccctgaatgcggctaatcctaactgtggagcagatacccacacgccagtgggcagtctgtcgtaacgggcaactctgcagcggaaccgactactttgggtgtccgtgtttccttttattcttatactggctgcttatggtgacaattgagagattgttaccatatagctactggattggccatccaataacaaacagagcaattgtttatctttttgttggttttgtaccattaaattacaaggttttgaaaaccctcaaattggtcatactgtttaatacagcaaa

SEQ ID NO: 14178 - RNA, 790 nt, synthetic construct
  source 1..790: mol_type = other RNA
aaaaacaaaaaacaaaaaaaacaaaaaaaaaaccaaaaaaacaaaatttaaacagctctggggttgttcccaccccagaggcccacgtggcggctagtactctggtatcgcggtacctttgtacgcctgttttatacccctaccccatgtaactttagaagcagttcaacaagttcaatagggggggtgcaaaccagcaccaccacgaacaagcacttctgtaaccccggtgaccttgtataagctgtgcccacggctgaaagcgagtgatccgttatccgcttaagtacttcgagaagcttagtatcaccttggaatcttcgatgcgttgcgctcagcactctatcccgagtgtagcttaggctgatgagtctgggcgttccccaccggcgacggtggcccaggctgcgttggcggcctacccatggctaacgccatgggacgctagatgtgaacaaggtgtgaagagcctattgagctacttaagagtcctccggcccctgaatgcggctaatcccaaccacggagcaggtgccttcaacccagagggcggcctgtcgtaacgcgcaagtctgtggcggaaccgactactttgggtgtccgtgtttccttttatcttttatatggctgcttatggtgacaatcatagattgttatcataaagcgacttggattggccatccggtaaaatacaaacacatcatctacttgtttgttggatttactccactcacccaatttactcccagcataatatccattgttttgttaacaagacattgctatcacg

SEQ ID NO: 14179 - RNA, 789 nt, synthetic construct
  source 1..789: mol_type = other RNA
aaaaacaaaaaacaaaaaaaacaaaaaaaaaaccaaaaaaacaaaaataaaacagcctgtgggttgttcccacccacagggcccaccgggcgctagcacactggtatctcggtacctttgtgcgcctgttttatccacccttttcccatttaatttagaagcacgcgccaagacggtcgatagggagcccagtaagccaattgggctgtgaccaagcacttctgtaaccccgggccgagtatcaataagctgctcgcgcggctgaaagagaaaaagctcgttacccggccaattacttcgagaaacctagtagcatcatgaaagttgcgcagcgtttcgctccacacaaccccagtgtagatcaggccgatgagtcaccgcgttccccacgggtgaccgtggcggtggctgcgatggcggcctgcccatggggccacccatgggacgcttcaatactgacatggtgtgaagagtctattgagctaattggtagtcctccggcccctgaatgcggctaatcctaactgcggagcagatgcccacgcaccagtgggaagtctgtcgtaacgggtaactctgcagcggaaccgactactttgggtgtccgtgtttccttttatttctactctggctgcttatggtgacaattgaaaggttgttaccatatagccattggattggccatccggtgtcaaatagagcgattatttattcgtttgttgggtttgtaccactgaattacaaagccttaaacactcttaactacattttaatccttaactcatcaaa

SEQ ID NO: 14180 - RNA, 789 nt, synthetic construct
  source 1..789: mol_type = other RNA
aaaaacaaaaaacaaaaaaaacaaaaaaaaaaccaaaaaaacaaaattaaaacagcctgtgggttgttcccacccgcagggcccactgggcgctagcacactggtatcacggtacttttgtgcgcctgttttatccacccttccccgaatgaaacttagaagtttgaattaaacggtcaataggaaacccagtacaccaactgggtcatgaccaagcacttctgtgaccccggaccgagtatcaataagctactcacgtggctgaaggagaaaacgttcgttacccggccaattacttcgagaaacttagtaccaccatgaaagttgcgcagcgtttcgctccgcacgaccccagtgtagatcaggctgatgagtcaccgcgttccccacgggtgaccgtggcggtggctgcgttggcggcctgcccttggggcaacccaagggacgcttcaatactgacatggtgcgaagagtctattgagctaattggtagtcctccggcccctgaatgcggctaatcccaactgcggagcagatacccacatgccagtgggcagtctgtcgtaatgggcaactctgcagcggaaccgactactttgggtgtccgtgtttcctttatttcttacactggctgcttatggtgacaattgagagattgttgccatatagctattggattggccatccggtgtctaatagagcaattatctacctttttgttggatttattccactcaactataaagtactcaaaacacttacatacattgtagatctcaacacaacaaa

SEQ ID NO: 14181 - RNA, 789 nt, synthetic construct
  source 1..789: mol_type = other RNA
aaaaacaaaaaacaaaaaaaacaaaaaaaaaaccaaaaaaacaaaatgtgctcttccgatctggttgttcccacccacagggcccactgggcgccagcacactggtattacggtacccttgtgcgcctgttttatccacccccccccactgtaacttagaagataaccacacgcggtcaataggtgactcagtacgccaactgggtcgcgaccaagcacttctgttaccccggaccgagtatcaataagctgctcgcgcggctgaaggagaaaacgttcgttacccggccaattacttcgagaaacctagtaccaccatggaggttgcgcagcgtttcgctccgcacaaccccagtgtagatcaggtcgatgagtcaccgcaatccccacaggcgactgtggcggtggctgcgttggcggcctgcccatggggaaacccatgggacgcttcaatatcgacatggtgcgaagagtctattgagctaattggtagtcctccggcccctgaatgcggctaatcctaactgtggagcagatacccacactccagtgggcagtctgtcgtaatgggcaactctgcagcggaaccgactactttgggtgtccgtgtttccttttattcctatgctggctgcttatggtgacaattgacagattgttaccatatagctactggattggccatccggtgacaagcagagcgattgtttacttatttgttggtttcattccactcaattataaagtactaaacacccttaatttcattataactcttaacacgttaaa

SEQ ID NO: 14182 - RNA, 789 nt, synthetic construct
  source 1..789: mol_type = other RNA
aaaaacaaaaaacaaaaaaaacaaaaaaaaaaccaaaaaaacaaaattaaaacagcctgtgggttgttcccacccacagggcccacgtggcgttagcacactggtatcccggtacctttgtgcgcctgttttatacaccccaaaccccaatgtaaattagaagaaaataacaccgatcaatagtgggtgtggcacaacagccacatcatgatcaagcactactgttcccccggactgagtatcaataagctgctcgcgcggctgaaggagaaaacgttcgttatccggccaattacttcgagaaacctagtaccaccatgaaggttgcgcagtgtttcgctccacacaaccccagtgtagatcaggtcgatgagtcaccgcattccccacaggcgactgtggcggtggctgcgctggcggcctgcccatggggtgacccatgggacgcttcaatactgacatggtgtgaagagtctattgagctaattggtagtcctccggcccctgaatgcggctaatcctaactgcggagcagatacccacgcaccagtgggtagtctgtcgtaacgggtaactctgcagtggaaccgactactttgggtgtccgtgtttccttttattctcacattggctgcttatggtgacaattgaaagattgttaccatatagctactggattggccatccggtgacaaacagagcaattgtgttcctcttcgatgggttcatacctctcaacaagatcagctttcgaactttgtgctacatcatcaagctaaacacaacaaa

SEQ ID NO: 14183 - RNA, 788 nt, synthetic construct
  source 1..788: mol_type = other RNA
aaaaacaaaaaacaaaaaaaacaaaaaaaaaaccaaaaaaacaaaattaaaacagcctgtgggttgatcccacccacagggcccattgggcgctagcactctggtatcacggtacctttgtgcgcctgttttataccccctcccccaactgtaacttagaagtaacacacaccgatcaacagtcagcgtggcacaccagccacgttttgatcaagcacttctgttaccccggactgagtatcaatagactgctcacgcggttgaaggagaaagcgttcgttatccggccaactacttcgaaaaacctagtaacaccgtggaagttgcagagtgtttcgctcagcactaccccagtgtagatcaggtcgatgagtcaccgcattccccacgggcgaccgtggcggtggctgcgttggcggcctgcccatggggaaacccatgggacgctctaatacagacatggtgcgaagagtctattgagctagttggtagtcctccggcccctgaatgcggctaatcctaactgcggagcacacaccctcaagccagagggcagtgtgtcgtaacgggcaactctgcagcggaaccgactactttgggtgtccgtgtttcattttattcctatactggctgcttatggtgacaattgagagattgttaccatatagctattggattggccatccggtgaccaatagagctattatatatctctttgttgggtttataccacttagcttgaaagaggttaaaacattacaattcattgttaagttgaatacagcaaa

SEQ ID NO: 14184 - RNA, 788 nt, synthetic construct
  source 1..788: mol_type = other RNA
aaaaacaaaaaacaaaaaaaacaaaaaaaaaaccaaaaaaacaaaattaaaacagctctggggttgttcccacccacagggcccaccgggcgccagcactctggtatcacggtacctttgtgcgcctgttttatacccccgtccccggttgtaacttagaagtaacactccacgaccgatagtaggtgtggcacgccagccatgtcttggtcaagcacttctgtttccccggattgagtatcaataggctgttcacacggccgaaggagaaaacatccgttatccggccaactacttcgagaaacctagtaccaccatgaaggttgcgcagtgtttcgctccgcacaaccccagtgtagatcaggccgatgagtcaccgctttccccacgggcgaccgtggcggtggctgcgttggcggcctgcccatggggaaatccatgggacgcttcaatactgacatggtgcgaagagtctattgagctagttggtattcctccggcccctgaatgcggctaatcctaactgcggagcagacacccacatgccagtgggcagtctgtcgtaacgggcaactctgcagcggaaccgactactttgggtgtccgtgtttccttttattcttatactggctgcttatggtgacaattgaaagattgttaccatatagctattggattggccatcctgtgactaacagagctattgtatacctatttgttggttttgtgccactgaattacaaggctttaaacaccctcaactttataatactactcaactcattaaa

SEQ ID NO: 14185 - RNA, 782 nt, synthetic construct
  source 1..782: mol_type = other RNA
aaaaacaaaaaacaaaaaaaacaaaaaaaaaaccaaaaaaacaaaagtgggttgcacccactcacaggacccacgcggtgctagcactctggttccacgggacctttgtgcgcctgttttatgtcccctcccccaatttgtaacttagaagcaatttgcaacactgatcagtagcaggcatagcgcaccagctatgtcttgatcaagcacttctgtttccccggaccgagtatcaatagactgtttacacggttgaaggagaaagcgtccgttatccggctaactacttcgagaaacccagtagcaccattgaaactacagagtgtttcgctccacacttcccccgtgtagatcaggtcgatgagtcactgcaatccccacgggcgaccgtggcagtggctgcgctggcggcctgcctatggggcaacccataggacgctctaatgtggacatggtgtgaagagtctattgagctagttagtagtcctccggcccctgaatgcggctaatcccaactgcggagcacatgccttcaacccagagggtagtgtgtcgtaatgggcaactctgcagcggaaccgactactttgggtgtccgtgtttccttttattctcacattggctgcttatggtgacaatcacagaattgttaccatatagctattggattggccatccggtgtgcaatagagctattatatacctatttgttggctttgtaccactgaccttaaaatctttaaccactcttgagtgtatattaacccttaatacaattaaac

SEQ ID NO: 14186 - RNA, 780 nt, synthetic construct
  source 1..780: mol_type = other RNA
aaaaacaaaaaacaaaaaaaacaaaaaaaaaaccaaaaaaacaaaattaaaacagctctggggttgttcccaccccagaggcccacgtggcggctagtacaccggtatcacggtacccttgtacgcctgttttatactcccttcccccgtaacttaraagctacaaatccaagttcaatagaagggggtacaagccagtaccaccacgaacaagcacttctgtttccccggtgaagtaacataggctgtacccacggctgaaagcaactgatccgttatccgctcttgtacttcgagaagcctagtaccaccttggaatcttcgatgcgttgcgctcagcactcaaacccagagtgtagcttaggctgatgagtctggacaatcctcaccggtgacggtggtccaggctgcgttggcggcctacctgtggcccaaagccacaggacgctagttgtgaacaaggtgtgaagagcctattgagctacatgagattcctccggcccctgaatgcggccaatcccaaccgcggagcaggtggttgcaacccagcaaccggcctgtcgtaatgcgcaagtctgcggcggaaccgactactttgggtgtccgtgtttcctttatttcttataatggctgcttatggtgacaatcacagattgttrtcataaagcgaattggattggccatccggtgaaagttaaatcaattatccacctatttgttggattcgttccattggattcatacactttgcacttgattagttacgacagcatcatcaca

SEQ ID NO: 14187 - RNA, 776 nt, synthetic construct
  source 1..776: mol_type = other RNA
aaaaacaaaaaacaaaaaaaacaaaaaaaaaaccaaaaaaacaaaaacatggggggtctgcggacggcttcggcccacccgcgacaagaatgccgtcatctgtcctcattacccgtattccttcccttcccccgcaaccaccacgcttactcgcgcacgtgttgagtggcacgtgcgttgtccaaacagctacacccacacccttcggggcgggtttgtcccgccctcgggttcctcgcggaacccccccctccctctctctctttctatccgccctcacttcccataactacagtgctttggtaggtgagcaccctgaccccccgcggaagctgctaacgtggcaactgtggggatccaggcaggttatcaaaggcacccggtctttccgccttcaggagtatctctgccggtgaattccggtagggctctgcttggtgccaacctcccccaaatgcgcgctgcgggagtgctcttccccaactcatcttagtaacctctcatgtgtgtgcttggtcagcatatctgaggcgacgttccgctgtcccagaccagtccagcaatggacgggccagtgtgcgtagtcgctttccggttttccggcgcatgtttggcgaaacgctgaggtaaggttggtgtgcccaacgcccgtaatttggtgatacctcaagaccacccaggaatgccagggaggtaccccacttcggtgggatctgaccctgggctaattgtctacggtggttcttcttgcttccacttctcttttttctggcatg

SEQ ID NO: 14188 - RNA, 764 nt, synthetic construct
  source 1..764: mol_type = other RNA
aaaaacaaaaaacaaaaaaaacaaaaaaaaaaccaaaaaaacaaaatttcgaccgccttatggcaggcgggcttgtggacggcttcggcccacccacagcaagaatgccatcatctgtcctcacccccatttctcccctccttcccctgcaaccattacgcttactcgcatgtgcattgagtggtgcacgtgttgaacaaacagctacactcacgtgggggcgggttttcccgcccttcggcctctcgcgaggcccacccttccccttcctcccataactacagtgctttggtaggtaagcatcctgatcccccgcggaagctgctcgcgtggcaactgtggggacccagacaggttatcaaaggcacccggtctttccgcctccaggagtatccctgctagtgaattctagtggggctctgcttggtgccaacctcccccaaatgcgcgctgcgggagtgctcttccccaactcaccctagtatcctctcatgtgtgtgcttggtcagcatatctgagacgatgttccgctgtcccagaccagtccagcaatggacgggccagtgtgcgtagtcgtcttccggcttgtccggcgcatgtttggtgaaccggtggggtaaggttggtgtgcccaacgcccgtactttggtgacaactcaagaccacccaggaatgccagggaggtaccccgcctcacggcgggatctgaccctgggctaattgtctacggtggttcttcttgcttccatttctttcttctgttc

SEQ ID NO: 14189 - RNA, 758 nt, synthetic construct
  source 1..758: mol_type = other RNA
aaaaacaaaaaacaaaaaaaacaaaaaaaaaaccaaaaaaacaaaatcaccctctttcccggtggtctggtcccggaccaccgttactccattcagcttcttcggaacctgttcggaggaattaaacgggcacccatacatccccatcccctttctgtaacttaagtatgtgtgcttgtaatcttgactcccacggaatggatcgatccgctggagaacaaactgctagatccacatcctcccttcccctgggaggaccttggtcctcccacatcctccccccagcctgacgtaccacaggctgtgtgaagcccccgcgaaagctgctcacgtggcaattgtgggtccccccttcatcaagacaccaggtctttcctccttaaggctagccccgatgtgtgaattcacattgggcaactagtggtgtcactgtgcgctcccaatctcggccgcggagtgctgttccccaagccaaacccctggcccttcactatgtgcctggcaagcatatctgagaaggtgttccgctgtggctgccagcctggtaacaggtgccccagtgtgcgtaaccttcttccgtctccggacggtagtgattggttaagatttggtgtaaggttcatgtgccaacgccctgtgcgggatgaaatctctactgccctaggaatgccaggcaggtaccccaccctcgggtgggatctgagcctgggctaattgtctacgggtagtttcatttccaatccttttatgtcggagtc

SEQ ID NO: 14190 - RNA, 755 nt, synthetic construct
  source 1..755: mol_type = other RNA
aaaaacaaaaaacaaaaaaaacaaaaaaaaaaccaaaaaaacaaaattaaaacagccttggggttgttcccactccaagggcccacgtggcggctagtactctggtatttcggtacctttgtacgcctgttttatctcccttcccaatgtaacttagaagttttcaaatcgaagctcagtaggtggggcgcaaaccagcgctttcatgagcaagcacttctgttaccccggtgcggttgtatagactgtttccacggttgaaaacaacttatccgttatccgctatagtacttcgagaaacctagtatcacctttggattgttgatgcgttgcgctcagcacactaacccgtgtgtagcttgggctgatgagtctggacgtaccccactggtgacagtggtccaggctgcgttggcggcctactcatggtgaaaaccatgagacgctagacatgaacaaggtgtgaagagtctattgagctactatagagtcctccggcccctgaatgcggctaatcttaaccatggagcaagtgctcacaagccagtgagttgcttgtcgtaacgcgcaagtccgtggcggaaccgactactttgggtgtccgtgtttcactttttacctttatgactgcttatggtgacaatttaatattgttaccatttagcttgtcagattaatcgcgtgaaatcctaaatcttgttcaccaatttgcattcggatagcttcatttgaaaattctaaactcattcataaag

SEQ ID NO: 14191 - RNA, 751 nt, synthetic construct
  source 1..751: mol_type = other RNA
aaaaacaaaaaacaaaaaaaacaaaaaaaaaaccaaaaaaacaaaagaaaggggtctcctagagagcttggccgtcgggccttataccccgacttgctgagtttctctaggagagtccctttcccagccctgaggcggctggataataaaggcctcacatgtaacaaacatctaagacaaaataatttgccttgcacctggtccccactagttgaaggcatctagcaataagatgagtggaacaaggacgcttaaagtgcaatgatagttatcttttctaacccactatttatagtggggtggtggatggcgcaccataattctaatagtgagataccacgcttgtggaccttatgctcacacagccatcctctagtaagtttgtgagacgtctggtgacgtgtgggaacttactggaaacaatgctttgccgtaaggctttcattagccagcggaccaccacctggtaacaggtgcctctggggccaaaagccaaggtttaatagaccctaatggaatggttcaaacctggagcattgtggaaagtacttagtacctgctgatctggtagtaatgcaaacactagttgtacggcccacgaaggatgcccagaaggtacccgtaggtaacaagtgacactatggatctgatctggggccaactacctctatcttggtgagttggttaaaaaacgtctagtgggccaaacccaggggggatccctggtttccttttattttactttgtcaat

SEQ ID NO: 14192 - RNA, 746 nt, synthetic construct
  source 1..746: mol_type = other RNA
aaaaacaaaaaacaaaaaaaacaaaaaaaaaaccaaaaaaacaaaaggggttgttcccaccctagaggcccacgtggcggccagtactctggtatcacggtacctttgtacgcctgttttatatccctttccccgtaacttagaagaaaacaattcaagttcactaggagggggtacaaaccagtaccaccacgaacaagcacttctgtttccccggtgatgttgtataaactgtacccacggttgaaaacgactgatccgttatccgctcttgtacttcgagaagcccagtatcaccttgggatcttcgatgcgttgcgttcagcactcaaccccagagtgtagcttaggtcgatgagtctggacactccccaccggcgacggtggtccaggctgcgttggcggcctacctgtggcccaaagccacaggacgctagttgtgaacaaggtgtgaagagcctattgagctacaagagagtcctccggcccctgaatgcggctaatcctaaccacggagcaagagtgcacaaaccagtacatgtcttgtcgtaacgcgcaagtctgtggcggaaccgactactttgggtgtccgtgtttccttttatttttatcatggctgcttatggtgacaatctaagattgttatcatatagctattggattggccatccggtaattcgttgagatttgagcatttgcttattcctttaacaattttaactgttcactacactccaacagtcaaa

SEQ ID NO: 14193 - RNA, 735 nt, synthetic construct
  source 1..735: mol_type = other RNA
aaaaacaaaaaacaaaaaaaacaaaaaaaaaaccaaaaaaacaaaacaccccagaggcccacgtggcggctagtactctggtatcacggtacctttgtacgcctgttttatatcccttcccccgtaactttagaagcttaacaaaagttcaatagaaggggtgcaaaccagtacctccacgaacaagcacttctgtctccccggtgaagtcacatagactgtacccacggtcaaaagtgattgatccgttatccgcttgagtacttcgagaagcctagtatcaccttggaatcttcgatgcgttgcgctcaacactctaccccgggtgtagcttaggctgatgagtctgggcatcccccaccggtgacggtggcccaggctgcgttggcggcctacccatggctaacgccatgggacgctagttgtgaacaaggtgtgaagagcctattgagctactcaagaatcctccggcccctgaatgcggctaatcccaaccacggagcaatcgctcacgatccagtgagtaggttgtcgtaatgcgcaagttcgtggcggaaccgactactttgggtgtccgtgtttccctttttacttatactggctgcttatggtgacaatttacagattgttaccatatagctattggattggccatccagtattgtgttacatatattaaagtacttttccacaagcaacaactacattgtgtttgaaccacaatagccactacaa

SEQ ID NO: 14194 - RNA, 730 nt, synthetic construct
  source 1..730: mol_type = other RNA
aaaaacaaaaaacaaaaaaaacaaaaaaaaaaccaaaaaaacaaaacctcttggaagtccatggtgaggggacctgatacctcaccgccgtttgcctaggctataggctatttgtccctttccctctcccctgttttgtgtaaatattaattcctgcaggttcagggttctttaatctgtttctctataagaacactcattttcacgctttctgtctgctttcttccagggctctccccttgccctaggctctggccgttgcgcccggcggggtcaactccatgattagcatggagctgtaggagtctaaattggggacgcagatgtttgggacgtcaccttgcagtgttaacttggctctcatgaaactctttgatcttccacaagaggtaggctacgggtgaaacctcttaagctagtacttctatgaagagatgctttggatagggtaacagcggcggatattggtgagttgttaagacaaaaacctttcaacgccggaggactggctctcatccagtggatgcattgagtggattgtttgtcagggctgtctctaggcttaatctcagacctctctgcgcttagggcaaacattacttggccttaaatgggatcctgtgagaggggatccctccattgactgctggacttttctttggggccttaggtagtgtttgcctctgaggtactcaggggcatttaggtttttcctcactcttaaataatt

SEQ ID NO: 14195 - RNA, 724 nt, synthetic construct
  source 1..724: mol_type = other RNA
aaaaacaaaaaacaaaaaaaacaaaaaaaaaaccaaaaaaacaaaacgggccttataccccgacttgctgagcttctctaggagagtccctttcccagccctgaggcggctggtcaataaaagcctcaattgtaacaaacatctaagattattaaattaaccccatgcctggtctccactagttgaaggcaacttgcaataaaatgagtggaaacaagacgcttaaagcatggtgtaaattaatttttctagcccacactttgtgtggggtggcagatggcgtgccataattctattagtgagataccacgcttgtggaccttatgctcacacagccatcctctagtgagtttgtgcgacgtctggtgacgtgtgggaacttattggaaacaacattttgctgtaaagcatcctattgccagcggaacaacacctggtaacaggtgcctctggggccaaaagccaaggtttaacagaccctttaggattggttataaacctgaaatgttgtggaagatacttagtacctaccgatctggtagtagtgcaaacactagttgtaaggcccacgaaggatgcccagaaggtacccgtaggtaacaagagacactatggatctgatctggggccaactacctctatcttggtgagttggttaaaaaacgtctagtgggccaaacccaggggggatccctggtttccttttattttatcaattttcact

SEQ ID NO: 14196 - RNA, 715 nt, synthetic construct
  source 1..715: mol_type = other RNA
aaaaacaaaaaacaaaaaaaacaaaaaaaaaaccaaaaaaacaaaatttttaaaacagcctgggggttgtttccccctccgaggtcccctggacgcccgtaccccggcatcacggtgcccttgtatgcctgttttataatcccccccccccgcaactttagaagaaaacgaactccgagctcagtaggcgtcacgtttccagcgtgactacgagcaagcacttctgtttccccggttgcgccctatatgctgtgtgaacggcagaaaggggcaaaatcgttatccgcttgattactgcgggacgcctagtatcactatggattgacttgagggttgcgctcagcacatccccagtgtagcttgggccgatgaggctccgaattccccacgggcgaccgtgtcggagcctgcgttggcggcctacccgcgcctcacggcgtgggacgctcatttcatgacatggtgcgaagagtctactgcgctaatcaaggctcctccggcccctgaatgtggctaatcctaaccactgatcctgtgagcacacgccagtgcccagcaggtcgtaatgcgcaagtcggtggcggaaccaactactttgggtgtccgtgtttcctttatttcctcattgaatgcttatggtgacaattgttgagtacagttgttaccattactgcactctgcaaatagtgaataaaccacgcaacaatataacaca

SEQ ID NO: 14197 - RNA, 687 nt, synthetic construct
  source 1..687: mol_type = other RNA
aaaaacaaaaaacaaaaaaaacaaaaaaaaaaccaaaaaaacaaaattaaaacagccgtgtggttgtacccaccaccggacacactgtgtgttgtgcactggaatctcggttcctttgcatgcctgttttaaaccccccttcccccactctttctatcattcttttcttcctaatgtaacttagacgttataccacagtccaataggacgtggccaatccaggccatgacggacaagcacttctgtctccccgggcgtgtgaataggcctcaacaaggctgaagctgtagcgctcgttatccgcatttgtactacgcgatggctagtatcatccttctcttggtcttggcgtttcgctcagcgtggtaaccccccacgtagatcagggcaatgaggctgcatatgccccaccggcgacggtgatgcagcctgcgtggtgccccgcctgggttaacccccaggacgccacaatcaagacagggtgagaagacctgagtgtgctacagatgagtcctccggcccctgaatgcggctaatcctaaccctgcagctatcgtatgcaaaccagcatattggtagtcgtaacgagcaattgcgggacggaaccgactactttgggtgtccgtgtttctctttttatttgaaatgttgcttatggttacaagttttggtattaaacttgtgacc

SEQ ID NO: 14198 - RNA, 679 nt, synthetic construct
  source 1..679: mol_type = other RNA
aaaaacaaaaaacaaaaaaaacaaaaaaaaaaccaaaaaaacaaaattaaaactgggtgtgggttgttcccactcacaccacccaatgggtgttgtactctgttattccggtaactttgtacgccagttttccctcccttctccccctcctacccttttacgtaacttagaagctttaaacatgagaccaatagcaggcaactttccaggttgtctaaggtcaagcacttctgtttccccggttgacgttgatatgctccaacagggcaaaaacaactgatatcgttatccgcaaagtgcctacacagagcctagtaggattctgaaagatctttggttggtcgctcagctgcatacccagcagtagacctcgcagatgaggctggacattccccactggtaacagtggtccagcctgcgtggctgcctgcacacctcttacgaggtgtgaagccaaggattcgacagggtgtgaagagccgcgtgtgctcactttgagtcctccggcccctgaatgcggctaaccttaaacctgcagccatagctcataagccaatgagtttatggtcgtaatgagtaattgcgggatgggaccgactactttgggtgtccgtgtttcattttttccttttatcaattgcttatggtgacaatatatatatatatatatattggcatc

SEQ ID NO: 14199 - RNA, 670 nt, synthetic construct
  source 1..670: mol_type = other RNA
aaaaacaaaaaacaaaaaaaacaaaaaaaaaaccaaaaaaacaaaattaaaacagcggatgggtatcccaccatccgacccactgggtgtagtacyctggtattatgtacctttgtacgcctgtttctccctccctactaccccgcctcaagcatcctgtaacttagaagaattgaaaaaccgcacaacaggagctattacaaccagtaatagttagtgcaagcacttctgtttccccggagcggagtatagacggccaccgctgtcaaaagctcttaaccgttatccgccagttaactacgtaacggctagtaacatcttgttgtgcttagggtgttcgatcaggtgaagaaaaacccccttcactagtctggtcgatgaggctgagaagtccccacgggcgaccgtgtctcagcctgcgtggcggccagcccagcatatgctgggacgccttaagtatgacatggtgtgaagacccgcatgtgcttaactgtgagtcctccggcccctgaatgcggctaacctaaaccctggagccttggagcacaagccagtgcttacaaggtcgtaatgagcaattccgggacgggaccgactactttgggtgtccgtgtttccttttatctcattattgttcttatggttacaatatatagagtatattgtaatc

SEQ ID NO: 14200 - RNA, 664 nt, synthetic construct
  source 1..664: mol_type = other RNA
aaaaacaaaaaacaaaaaaaacaaaaaaaaaaccaaaaaaacaaaattaaaactgagtgtgggttgctcccacccacactgtctacgggacgttgtactcttgtattccggtacacttgtacgccagtttgccaccctaaataccccgtaacaatagaagtctacgcacacttagaccaatagggggtgttcatccagttcacccaaggtcaagcacttctgtttccccggcataggggtgttaggcttcacccgaggccaaagctctgattgtcgttatccgcacaactactggacaaagcctagtagcgccctacgatgtagtatggttggttgttccgccagtatcccctggtaaacctggcagatggggctagaagttcctcactggcgacagtgttctagcccgcgtggctgcctgctccctcacgggagaagccattctactgacaaggtgtgaagagccccgtacgctagttgtgattcctccggcccctgaatgcggctaatccaaccctgcagccattacatggaagccaccatgtggatggtcgtaatgagtaattgcgggacggaaccgactactttgggtgtccgtgtttcttgtttttcttttactgacgtttatggtgacaatatatatataacgtatatattgttcatc

SEQ ID NO: 14201 - RNA, 663 nt, synthetic construct
  source 1..663: mol_type = other RNA
aaaaacaaaaaacaaaaaaaacaaaaaaaaaaccaaaaaaacaaaattaaaactggatctgggttgttcccacccagatcacctacatggtgttgtacactattattacggtaattttgtacgccagttttatatccccttccccaaatgtaacttagaagcaatgcaaactgatcaatagggggcaatcatccagattgctaatgatcaagcacttctgtttccccggtcaaggttgatatgctccacaagggcaaaaacaaccgagatcgttatccacaagatgcctacgcaaagcctagtaatgcttttgaagatacttggttggtcgctcagctgtgcacccgacagtagacctggcagatgaggctagaagtacccctctggcgacagagttctagcctgcgtggctgcctgcacacccttttgggtgtgaagccaagtattggacaaggtgtgaagagccccgtgtgctcatcttgaatcctccggcccctgaatgtggctaaccttaaacctgcagccagtgcacacaaaccagtgtgtagctggtcgtaatgagcaattgcgggatgggaccaactactttgggtgtccgtgtttcactttttacctttatattgcttatggtgacaatatatatagcacatatatattgttatc

SEQ ID NO: 14202 - RNA, 662 nt, synthetic construct
  source 1..662: mol_type = other RNA
aaaaacaaaaaacaaaaaaaacaaaaaaaaaaccaaaaaaacaaaattaaaactggatctaggttgtccccacctagatctcccatgtggagtggtactctattattccggtaatcttgtacgccagttttatatcccctcccccttttgtaacttagaagttatgaacatagaccaataggtggtgatcatccagatcacttaaggtcaagcacttctgtttccccggtcgacgttgatatgctccaccagggcaaaaacaacagagatcgttatccgcaaggtgcctacacaaagcctagtaaccccttggagagtatgtggttggtcgctcagctattccccatagtagacctggcagatgaggctagaaattccccactggtaacagtgttctagcctgcgtggctgcctgcgcactcttatgagtgcgaagccatatatttgacaaggtgcgaagagccccgtgtgctcaccttgagtcctccggcccctgaatgtggctaaccctaaccctgcagctagtgcatgaaatccatcatgttgctagtcgtaatgagtaattgcgggatgggaccaactactttgggtgtccgtgtttcactttttccttttatatttgcttatggtgacaatatatatataacatatatattggcatc

SEQ ID NO: 14203 - RNA, 661 nt, synthetic construct
  source 1..661: mol_type = other RNA
aaaaacaaaaaacaaaaaaaacaaaaaaaaaaccaaaaaaacaaaattaaaactggatctgggttgttcccacttggatctcccaaagggagtggtactctgttattacggtaactttgtacgccagttttatcctccccttaccccatgtaacttagaagtttttcataaagaccaatagttggtaatcatccagattacttaaggtcaagcacttctgtttccccggtcaatgttgatatgctccaacagggcaaaaacaactgcgatcgttatccgcaaagcgcctacgcaaagcttagtagcacctttgagattgtttggttggtcgttccgccatttcccctggtagacctggcagatgaggctagaagtaccccactggcgacagtgttctagcctgcgtggctgcctgcacaccctgtgggtgtgaagccaaataatggacaaggtgtgaagagccccgtgtgctcgctttgagtcctccggcccctgaatgcggctaaccttaaccctgcagctagagcatacaaaccagtgtgtatctagtcgtaatgagcaattgcgggatgggaccgactactttgggtgtccgtgtttcactttttttttacttataattgcttatggtgacaatatatatatagtatatattgacacc

SEQ ID NO: 14204 - RNA, 660 nt, synthetic construct
  source 1..660: mol_type = other RNA
aaaaacaaaaaacaaaaaaaacaaaaaaaaaaccaaaaaaacaaaattaaaactggatccaggttgttcccacctggatctcctacgggagttgtactctgttatttcggtaaccttgtacgccagttttatctcccctcccccaattgtaacttagaagcaatacacaaggaccaataggcagtgattaaccagatcacttaaggtcaagcacttctgtttccccggtctgagttgatatgctctaacagggcaaaaacaagtcagatcgttatccgcaaagtgcctacgcaaagcctagtatcatctttgaaaatgtatggttggtcattccgctgaaccccacagtagacctggcagatgaggctagaaaccccccactggcgacagtgttctagcctgcgtggctgcctgcacacccttatgggtgtgaagccatatatttgacaaggtgtgaagagccccgtgtgctcactttgagtcctccggcccctgaatgtggctaaccctaaccctgcagctagtgcatacaagccagtatgttgctagtcgtaacgagcaattgcgggatgggaccaactactttgggtgtccgtgtttcactttttacctttatactgcttatggtgacaatatatatatagcatatatattgacacc

SEQ ID NO: 14205 - RNA, 658 nt, synthetic construct
  source 1..658: mol_type = other RNA
aaaaacaaaaaacaaaaaaaacaaaaaaaaaaccaaaaaaacaaaattaaaactgggtccaggttgttcccacctggatctcctacatggagttgtactctgttattccggtaaccttgtacgccagttttatatcccctccccaaatgtaacttagaagttatacacacagaccaataggcggtgatcctccagatcactaacggtcaagcacttctgtctccccggtttgaattgatacgctccaacagggcgaaaacaatttgaatcgttacccgcaaagtgcctacgcaaagcctagtagcactttagaaaatttatggttggtcgctcagctataccccctagtagacctggcagatgaggctagaagtaccccactggcgacagtgttctagcctgcgtggctgcctgcacaccctcacgggtgtgaagccatatatttgacaaggtgtgaagagccccgtgtgctcactttgagtcctccggcccctgaatgtggctaaccttaaccctgcagctagtgcatgtaatccaacatgttgctagtcgtaatgagcaattgcgggatgggaccaactactttgggtgtccgtgtttcactttttaccttttatttgcttatggtgacaatatatataatatatatattggcatc

SEQ ID NO: 14206 - RNA, 657 nt, synthetic construct
  source 1..657: mol_type = other RNA
aaaaacaaaaaacaaaaaaaacaaaaaaaaaaccaaaaaaacaaaaataaaactggcgtgcatagttcccatccagatcacccaagtggtgtagtgctctgttattccggtaactttgcacgccagttttattacccctttccccagtaacttagaagctttaatacactgaccaatagggtgcgacaaccagtcgtacaaggtcaagcacttctgtttccccggtcaatgttgatatgctcctccagggcaaaaacaatagcgatcgttatccgcaagatgcctacgcaaagcctagtagcatctttgaaaatacttggttggtcgctcatgtgcaaccccagcattagacctggcagatgaggctagaaattccccactggcgacagtgttctagcctgcgtggctgcctgcacaccctaacgggtgtgaagcctggtattggacaaggtgtgaagagccccgtgtgctcatcttgagtcctccggcccctgaatgcggctaaccttaaacctgcagccattgcttacaatccagtgagtttatggtcgtaatgagcaattgcgggatgggaccgactactttgggtgtccgtgtttctctttttacttaaatttgagcttatggtgacaatatatagcaatatatattggcatc

SEQ ID NO: 14207 - RNA, 655 nt, synthetic construct
  source 1..655: mol_type = other RNA
aaaaacaaaaaacaaaaaaaacaaaaaaaaaaccaaaaaaacaaaagttgttcccacccctaccacccatgtggtgtagtgctcttgtattacggtacacttgcacgccagtttgcctccccaccccctttccatttacacccaaccttatgtaacttagaagcagtacactggaccaataggtggtaacaatccatgttaccaaaggtcaagcacttctgtctccccggcatgcgtggaataaacagtgcaaacggttgagaccacaaatgtcgttacccgcgcatgaactacgcagagcctagtatctccctgaaagtccattggttggtcgttcagctaaaccccatagtagacctggcagatgaggcaagacgcaccccactggcgacagtggtcttgcctgcgtggctgcctgcacacccttcggggtgtgaagccaattgacagacagggtgtgaagagccgagtgtgcttcatgtgaatcctccggcccctgaatgcggctaatctaaccccgcagctgtggcacacaagccagtgtgtatgcagtcgtaacgggcaactgcgggacggaaccgactactttgggtgtccgtgtttccttttattcttttatcaagtacttatggtgacaataataaatattgttacc

SEQ ID NO: 14208 - RNA, 636 nt, synthetic construct
  source 1..636: mol_type = other RNA
aaaaacaaaaaacaaaaaaaacaaaaaaaaaaccaaaaaaacaaaatgggtgtagtgctctggtattttgtacctttgcacgcctgtttcccctttgtacccacccttaatttcctccctctgtaacgttagaagtttgtgaaattaaaagtacaataggaagcatcacatccagtggtgtttagtacaagcactcctgtttccccggagcgaggtataggttgtacccacgaccaaaagcctttaaccgttacccgccaatcaactacgtaacggctagtaccatcatgtttttaatctggtgttcgatcaggtggtatcccccactagtctggtcgatgaggctaggaattccccacgggtaaccgtgtcctagcctgcgtggcggccagcccagcttatgctgggacgcctttttaaagacatggtgtgaagacccgcatgtgcttgattgtgagtcctccggcccctgaatgcggctaaccctaaccccggagcccagcaacataatccaatgttgtttgggtcgtaatgagtaattctgggatgggaccgactactttgggtgtccgtgtttccttttattcttatattgtcttatggtcacagcatatatattacatatatactgtgatc

SEQ ID NO: 14209 - RNA, 628 nt, synthetic construct
  source 1..628: mol_type = other RNA
aaaaacaaaaaacaaaaaaaacaaaaaaaaaaccaaaaaaacaaaagtactctggtattatgtacctttgtacgcctgttcttcccattgtacccttcctaaatttccaacccaagtgacgttagaagtttcacataaaagtacaataggaagcaccacatccagtggtgttttgtacaagcacttctgtttccccggagcgaggtataggctgtacccactgccaaaagcctttaaccgttatccgccaaccaactacgtaaaagctagtaacatcttgtttgtaacttggcgttcgatcaggtggattccccctccactagtttggtcgatgaggctaggagttccccacgggcgaccgtgtcctagcctgcgtggcggccaacccagcacttgctgggacgcccttttatagacatggtgtgaagactcgcatgtgcttggttgtgattcctccggcccctgaatgcggctaaccttaaccccggagccttgtgttgcaaaccagcaacattaaggtcgtaacgagcaattctgggatgggaccgactactttgggtgtccgtgtttccaatttttcttattattgtcttatggtcacagcatatttgataaatatactgtgatc

SEQ ID NO: 14210 - RNA, 618 nt, synthetic construct
  source 1..618: mol_type = other RNA
aaaaacaaaaaacaaaaaaaacaaaaaaaaaaccaaaaaaacaaaagtagtatacttgtattccggtacatttatacgccagttttatgatcccctaccccaaatgtaacttagaaacatgtacacaatgatcaatagggtggtggctatccaagtcacctaagatcaagcacttctgtttccccggtgagtgtggatatgctttacccaaggcagaaactaatctcatcgttatccgcaaggtgcctacgggaagcctagtaatattctgaaggtattctggttggtcgctcagttgcattcacccgtgcaatagacctggcagatggggctaggcataccccactggtaacagtggcctagcccgcgtggctgcctgcacaccttcgggtgtgaagccataatattgacagggtgtgaagagcctactgtgctcaccttgagtcctccggcccctgaatgtggctaatcctaaccccgtatccattgcacacaagccagtgtgtttatggtcgtaatgggtaactacgggatggaaccaactactttgggtgtccgtgtttcttgtttttctttaatattgcttatggtgacattatatatcgatatagtgtcatc

SEQ ID NO: 14211 - RNA, 606 nt, synthetic construct
  source 1..606: mol_type = other RNA
aaaaacaaaaaacaaaaaaaacaaaaaaaaaaccaaaaaaacaaaatcttgtattacggtacatttccataccagttttatacaccccaccccgaaactcatagaagtttgtacacaatgaccaataggcggtggccatccaggtcactaatggtcaagcacttctgtttccccggcacccttgtatacgcttcacccgaggcgaaaaacgaggtcgtcgttatccgcaaagtgcctacgaaaagcctagtaacactttgaaaacctatggttggtcgctcaactgttcacccaacagtagacctggcagatgaggctagacactccccaccagcgatggtggtctagcctgcgtggctgcctgcacaccctaccgggtgtgaagccagaaagtggacaaggtgtgaagagcctattgtgctcactttgagtcctccggcccctgaatgtggctaaccctaaccccgtagctgttgcatgtaatccaacatgtatgcagtcgtaatgggcaactatgggatgggaccaactactttgggtgtccgtgtttcctgttttactttttcattgcttatggtgacaattgtatctgatacacttgttacc

SEQ ID NO: 14212 - RNA, 595 nt, synthetic construct
  source 1..595: mol_type = other RNA
aaaaacaaaaaacaaaaaaaacaaaaaaaaaaccaaaaaaacaaaagtctggggttgatcccccccccccggcactgggtgcaagccccagaaaccgacgcctatctaagtagacgcaatgactcggcgccgacccggcgaccggccaaaaggtggtggatgggtgatgccagggttggtaggtcgtaaatcccggtcatcttggtagccactataggtgggtcttaagggaaggttaagattcctcttgtgcctgtggcgagacagcgcacggtccacaggtgttggccctaccggtgtgaataagggcccgacgtcaggctcgtcgttaaaccgagaccgacacccacccgggcaaacgacgctcacgtacggtccacgtcgcccttcaatgtctctcttgaccaataggctttgccggcgagttgacaaggaccagtgagggccgggggcgagggggaaggaccccctcgccctgcccattccggtgggacgggaaatgcatggggccacccagctccgcggcggcctgcagccggggtagcccaagagccttcgggtgagggcgggtggcatttttctttcttaaccgatc

SEQ ID NO: 14213 - RNA, 584 nt, synthetic construct
  source 1..584: mol_type = other RNA
aaaaacaaaaaacaaaaaaaacaaaaaaaaaaccaaaaaaacaaaatacgccagttttataaccccttcccttctgcaacttagaagtttgaacttaagaccaacaggtggtaatcaaccagattactaaaggtcaagcacttctgtttccccggtcaatattgatatgctccaccagggcaaaaacaattgcgatcgttatccgcaaagtgcctacgcaaagcttagtaacattttgaataatatatggttggtcgttccactattccccatagtagacctggcagatgaggctggaaactccccactggcgacagtgttccagcctgcgtggctgcctgcgcactctcacgagtgcgaagccatatatttgacaaggtgtgaagagccccgtgtgctcactttgagtcctccggcccctgaatgtggctaaccttaaccctgcagctagtgcatacaagccagtatgtagctagtcgtaatgagcaattgcgggatgggaccaactactttgggtgtccgtgtttcacttttatctttattatttgcttatggtgacagtatatagtgtatatattgttacc

SEQ ID NO: 14214 - RNA, 567 nt, synthetic construct
  source 1..567: mol_type = other RNA
aaaaacaaaaaacaaaaaaaacaaaaaaaaaaccaaaaaaacaaaatcactgggtgcaagccccagaaaccgacgcctatcaaaatagacgtgatggccccgcgccgaactggcgaccggccaaaaggtggtggatgggtgatgacagggttggtaggtcgtaaatcccggtcatcctggtagccactataggtgggtcttaaagggaggctacggtccctctcgcgcttacggagagaaagcgcacggtccacaggtgttggccctaccggtgtaataagggcccggcgctaggcacgccgttaaaccgagaccgttatccccctgggcaaacgacgcccatgtacggcctacgtcgcccttcaatgtctctcttgaccaataggctttgccggcgagttgacaagggccagtgggggccgggcggcgggggaaggacctccgccgctgcccttcccgggggagcgggaaatgcatggggccacccagctccgcggcggcctacagccggggtagcccaagaaccttcgggtgagggcgggtggcattttctttcctataccgatc

SEQ ID NO: 14215 - RNA, 521 nt, synthetic construct
  source 1..521: mol_type = other RNA
aaaaacaaaaaacaaaaaaaacaaaaaaaaaaccaaaaaaacaaaactacacccagtggtgttaagcacaagtacttctgtttccccggagcggagtatagacggtccccactgtcaaaagctcttaaccgttatccgccaaccaactacgtgacgactagtagcatcattttgacactttgacgttcgatcaggtaggttcaccccacctactagtttggtcgatgaggctgggagtccctcacaggtaactgtgtcccagcctgcgtggcggccaacccagcaattgctgggacgccaatttgttgacatggtgtgaagatcctaatgtgcttggttgtgagtcctccggcccctgaatgcggctaaccttaaccccggagccttgtggcacaagccagtgacattaaggtcgtaaggagcaattctgggatgggaccgactactttgggtgtccgtgtttcctatttttctttaaattgtcttatggtcacagcatatattaattatatactgtgatc

SEQ ID NO: 14216 - RNA, 491 nt, synthetic construct
  source 1..491: mol_type = other RNA
aaaaacaaaaaacaaaaaaaacaaaaaaaaaaccaaaaaaacaaaaaccacaaacactccagtttgttacactccgctaggaatgctcctggagcaccccccctagcagggcgtgggggatttcccctgcccgtctgcagaagggtggagccaaccaccttagtatgtaggcggcgggactcatgacgctcgcgtgatgacaagcgccaagcttgacttggatggccctgatgggcgttcatgggttcggtggtggtggcgctttaggcagcctccacgcccaccacctcccagatagagcggcggcactgtagggaagaccggggaccggtcactaccaaggacgcagacctctttttgagtatcacgcctccggaagtagttgggcaagcccacctatatgtgttgggatggttggggttagccatccataccgtactgcctgatagggtccttgcgaggggatctgggagtctcgtagaccgtagcac

SEQ ID NO: 14217 - RNA, 385 nt, synthetic construct
  source 1..385: mol_type = other RNA
aaaaacaaaaaacaaaaaaaacaaaaaaaaaaccaaaaaaacaaaagccagccccttacggggcgacactccgccatgaatcactcccctgcgaggaaccactgtcctcacgcagaaagcgtctagccatgacgttagtatgagtgtcgtacagcctccaggaccccccctcccgggagagccatagtggtctgcggaaccggtgagtacaccggaattgccgggaagactgggtcctttcttggatcaacccactctatgcccggagatttgggcgtgcccccgcgagactgctagccgagtagtgttgggtcgcgaaaggccttgtggtactgcctgatagggtgcttgcgagtgccccgggaggtctcgtagaccgtgcacc

SEQ ID NO: 14218 - RNA, 375 nt, synthetic construct
  source 1..375: mol_type = other RNA
aaaaacaaaaaacaaaaaaaacaaaaaaaaaaccaaaaaaacaaaatgaactgttgttgtagcaatgcgcatattgctacttcggtacgcctaattggtaggcgcccggccgaccggccccgcaagggcctagtaggacgtgtgacaatgccatgagggatcatgacactggggtgagcggaggcagcaccgaagtcgggtgaactcgactcccagtgcgaccacctggcttggtcgttcatggagggcatgcccacgggaacgctgatcgtgcaaagggatgggtccctgcactggtgccatgcgcggcaccactccgtacagcctgatagggtggcggcgggcccccccagtgtgacgtccgtggagcgcaac

SEQ ID NO: 14219 - RNA, 359 nt, synthetic construct
  source 1..359: mol_type = other RNA
aaaaacaaaaaacaaaaaaaacaaaaaaaaaaccaaaaaaacaaaaacttttaaagataaagtgagtgtagggtggctatctctcatctttttctttaactagctttgtgctagattttgtcttcggacaccaactcgaactaaacgaaatatttgtctttctatgaaaccatagaggacaagcgttgattatttccactcagtttggcaatcactccttggaacggggttgagcgaacggtgcagtagggttccgtccctatttcgtaagtcgcctagtagtagcgcgtgcggttccgcccgtacccgttggtgagctcaggttccgccctgtacctccctcgccggccgccaggaga

SEQ ID NO: 14220 - RNA, 334 nt, synthetic construct
  source 1..334: mol_type = other RNA
aaaaacaaaaaacaaaaaaaacaaaaaaaaaaccaaaaaaacaaaaaagcaacttatctatctacagatagaaaagttgctttttagactttgtgtctacttttctcaactaaacgaaatttttgctatggccggcatctttgatgctagagtcgtagtgtaattgaaatttcatttgggttgcaacagtttggaagcaagtgctgtgtgttctagtctaagggtttcgtgttccgtcacgagattccattctacaaacgccttacgcgaggttctgtctcgtgtttgtgtggaagcaaagttttgtctttgtggaaaccagtaactgttccta

SEQ ID NO: 14221 - RNA, 323 nt, synthetic construct
  source 1..323: mol_type = other RNA
aaaaacaaaaaacaaaaaaaacaaaaaaaaaaccaaaaaaacaaaaatttaagtgaatagcttggctatctcacttcccctcgttctcttgcagaactttgattttaacgaacttaaataaaagccctgttgtttagcgtattgttgcacttgtctggtgggattgtggcattaatttgcctgctcatctaggcagtggacatatgctcaacactgggtataattctaattgaatactatttttcagttagagcgtcgtgtctcttgtacgtctcggtcacaatacacggtttcgtccggtgcgtggcaattcggggcacatc

SEQ ID NO: 14222 - RNA, 311 nt, synthetic construct
  source 1..311: mol_type = other RNA
aaaaacaaaaaacaaaaaaaacaaaaaaaaaaccaaaaaaacaaaaattaaaggtttataccttcccaggtaacaaaccaaccaactttcgatctcttgtagatctgttctctaaacgaactttaaaatctgtgtggctgtcactcggctgcatgcttagtgcactcacgcagtataattaataactaattactgtcgttgacaggacacgagtaactcgtctatcttctgcaggctgcttacggtttcgtccgtgttgcagccgatcatcagcacatctaggtttcgtccgggtgtgaccgaaaggtaag

SEQ ID NO: 14223 - RNA, 310 nt, synthetic construct
  source 1..310: mol_type = other RNA
aaaaacaaaaaacaaaaaaaacaaaaaaaaaaccaaaaaaacaaaaatattaggtttttacctacccaggaaaagccaaccaacctcgatctcttgtagatctgttctctaaacgaactttaaaatctgtgtagctgtcgctcggctgcatgcctagtgcacctacgcagtataaacaataataaattttactgtcgttgacaagaaacgagtaactcgtccctcttctgcagactgcttacggtttcgtccgtgttgcagtcgatcatcagcatacctaggtttcgtccgggtgtgaccgaaaggtaag

SEQ ID NO: 14224 - RNA, 287 nt, synthetic construct
  source 1..287: mol_type = other RNA
aaaaacaaaaaacaaaaaaaacaaaaaaaaaaccaaaaaaacaaaaactttgtgtctactcttctcaactaaacgaaatttttctagtgctgtcatttgttatggcagtcctagtgtaattgaaatttcgtttagtttgtaaactggttaggcaagtgttgtattttctgtgtctaagcactggtgattctgttcactagtgcatacactgatatttaagtggtgttccgtcactgcttattgtggaagcaacgttctgtcgttgtggaaaccaataactgctaacc

SEQ ID NO: 14225 - RNA, 251 nt, synthetic construct
  source 1..251: mol_type = other RNA
aaaaacaaaaaacaaaaaaaacaaaaaaaaaaccaaaaaaacaaaagagtttgagcgattgacgttcgtaccgtctatcagcttacgatctcttgtcagatctcattaaatctaaactttttaaacaagattccctgttatccatgcttgtgagtgtggtttaatcataatcttgtattttactttccacacttttcatctctctgccagtgacgtgttggttgtcctcagcgtccctcccataggtcgca

SEQ ID NO: 14226 - RNA, 230 nt, synthetic construct
  source 1..230: mol_type = other RNA
aaaaacaaaaaacaaaaaaaacaaaaaaaaaaccaaaaaaacaaaatcccgcttcactgatctcttgttagatctttttgtaatctaaactttataaaaacatccactccctgtaatctatgcttgtgggcgtagatttttcatagtggtgtttatattcatttctgctgttaacagctttcagccagggacgtgttgtatcctaggcagtggccctcccataggtcaca

SEQ ID NO: 14227 - RNA, 228 nt, synthetic construct
  source 1..228: mol_type = other RNA
aaaaacaaaaaacaaaaaaaacaaaaaaaaaaccaaaaaaacaaaagtcttaggacgacgcatgtggtatcccagcccccgcctacattggcgggggcttttgaagcaccagacactggatctgatcaggaggagggtagctgctttacagcccctcttaaaaattgcccaaggtccggccacccaacctaggggactaggttttccttttatttttaaattgtcatt

SEQ ID NO: 14228 - RNA, 222 nt, synthetic construct
  source 1..222: mol_type = other RNA
aaaaacaaaaaacaaaaaaaacaaaaaaaaaaccaaaaaaacaaaaagaacaacgtgattacttcgaccctctgcgcgggcagtaaatatagcgcctcctctggcagttctctggacaagaactgttcccagtgcgtgggaaacaatagcgcgcgcgtcttggatgattccgctaagaatctcccaactaacatcatttgcgggtcccccgcctgcagggtg

SEQ ID NO: 14229 - RNA, 184 nt, synthetic construct
  source 1..184: mol_type = other RNA
aaaaacaaaaaacaaaaaaaacaaaaaaaaaaccaaaaaaacaaaactttgctcactcagcacaggatctgatcaggagatttgtctccggtgctttacaccggagcacaaatttaaaaattgcccaaggcctggcaaataacctaggggactaggttttcttttaatttacacgtctgtcaat

SEQ ID NO: 14230 - RNA, 178 nt, synthetic construct
  source 1..178: mol_type = other RNA
aaaaacaaaaaacaaaaaaaacaaaaaaaaaaccaaaaaaacaaaaagattttcttgcacgtgcgtgcgtttgcttcggacagcattagcagcggttggtttgaaagagatattcttttgtttctaccagtcgtgaacgtgttgaggaaaagacagcttaggagaacaagagctgggg

SEQ ID NO: 14231 - RNA, 174 nt, synthetic construct
  source 1..174: mol_type = other RNA
aaaaacaaaaaacaaaaaaaacaaaaaaaaaaccaaaaaaacaaaaagattttcttgcacgtgcgatagcttcggacagctttggcagcggcagatttgaaagagatattttttcactttcatcagtcgtgaacgtgttgagaaaaagacagcttaggagaacaagagctgggg

SEQ ID NO: 14232 - RNA, 166 nt, synthetic construct
  source 1..166: mol_type = other RNA
aaaaacaaaaaacaaaaaaaacaaaaaaaaaaccaaaaaaacaaaacacgtgagtgctctcgtttcagacaacgtgagcggcgctttgttggtatttccttggtgggaaagttttgaagcgttaacgtgttgaggaaaagacagcttaggagaacaagagctgggg

SEQ ID NO: 14233 - RNA, 164 nt, synthetic construct
  source 1..164: mol_type = other RNA
aaaaacaaaaaacaaaaaaaacaaaaaaaaaaccaaaaaaacaaaaagtatattctgcgtgctaatcgttcgacgttagtccgtggagtgagcttctaatagagttgttaacacgtttgaataatttctactgaaaggagtagaagaaaggagattcattccca

SEQ ID NO: 14234 - RNA, 153 nt, synthetic construct
  source 1..153: mol_type = other RNA
aaaaacaaaaaacaaaaaaaacaaaaaaaaaaccaaaaaaacaaaaagttgttgatctgtgtgaatcagactgcgacagttcgagtttgaagcgaaagctagcaacagtatcaacaggttttattttggatttggaaacgagagtttctggtc

SEQ ID NO: 14235 - RNA, 140 nt, synthetic construct
  source 1..140: mol_type = other RNA
aaaaacaaaaaacaaaaaaaacaaaaaaaaaaccaaaaaaacaaaaagttgttagtctacgtggaccgacaagaacagtttcgaatcggaagcttgcttaacgtagttctaacagttttttattagagagcagatctctg

SEQ ID NO: 14236 - RNA, 1518 nt, synthetic construct
  source 1..1518: mol_type = other RNA
aaaaaacaaaaaacaggaggaggaggaggaaaaaaaggaggaggaggaaaacgccataagcaaagcaatcctcctcctcctaaaaaacctcctcctcctcctagccgaaaaacaaaaaacaaaaaaaacaaaaaaaaaaccaaaaaaacaaaacacaagttgcaagaaacgcggtttgaaaataaagaacgttggcccttccataaggaatggaagagatgttttgaaagggggtctgggggtttttccccagaccccgggcccgccgctcaggcgggttactgtgtcatccatacacacctttccgtgtagcgcacgtaaaatgctaggcccgtaataggccgactggctttgccagtgattccccttgcgggatctttgttctttattttcaaaccgcgtttcttgcaactttgaatcaacaagaacgttggcccttccataaggaatggaagagatgtatttgaaatggaggtacactattgtaatgtcaatgaccttaccatccgctgtgatgggctcactcctgtacaccgtgagtccgcgcagtgctgacttaacacttaagtaatgtttaggccgagaattacaccgctcggctcccacctttcaccaccgtgggattaacaggtggtcaatctgtattcctgtctttggttatgtcaaagcaatacggcatgtgcaatggcgcacaggcccaaggcggagatctagacctcacagattgtgttacagattaagaccatgctggatggtcacgttggagactgcatgtggcagtcttgaaacgtgtggtttgacgtctaaccattatagcagtgggtggagtactgcaaagatgtcaccgtgctttacacggtttttgaaccccacaccggctgtttggcacttgcaggacagtaggtttattttctttcagatctcttttctagtcgtgcatgttctgtatgcacgagcggagtgatactcccgctccttcttggacaggcggcctccacgtcctttgtggaactcaaggttgccaagtcactggtgtttgaagtgaagattagagaaacactagggagtttcatgtggctttgccagggattgtagcgatgctgtgtgtgtgtgcggaatccccctcgtggcgacacgagcctcacaggccaaaagccctgtccgaaaggacccacacagtggggcacccccagcccctccctacaaagctttgtgcaaatgaacttttgtttggcttttcttaagcttctctcacatcaggccccaaagatgtcctgaaggtaccccgtgtatctgaggatgagcaccatcgactacccggacttgtgagccttttcacagacgcatgtggtacccaagccccttccctacggggaaggggctttgctcactcagcacaggatctgatcaggagatctgtctccggtgctttacaccggggcacagatttaaaaatttcccaaggcctggcacacaacctaggggactaggttttccttttatcacaaagatgtcaat

SEQ ID NO: 14237 - RNA, 1317 nt, synthetic construct
  source 1..1317: mol_type = other RNA
aaaaaacaaaaaacaggaggaggaggaggaaaaaaaggaggaggaggaaaacgccataagcaaagcaatcctcctcctcctaaaaaacctcctcctcctcctagccgaaaaacaaaaaacaaaaaaaacaaaaaaaaaaccaaaaaaacaaaattctgagaccggcacggtcaacccgactcatttacgagttactcatttattttgaaacatcataaagaacgtgaaccgctctttgtttctttaaggaatttagagtagaaaacatttgagatgaggcccggttgaactccgggcgctttccatccgctgtgatgggctcactcctgtacaccgtgagtccgcgcagtgctgacttaacacttaagtaatgtataggccgaggattacaccgctcggctcccacctttcaccaccgtgggattaacaggttcaatgcacaaattcctgtccttggctatgtcaaagcaatacagtgtgtacatggcgtgcacgctcaaagcggagacttaggcctcacagattgtgttttgtgttattggatgctggatggtcacgttggagactgcatgtggcagtcttgaaacgtgtggtttgacgtctatccattatggcagtgggtggagtactgcaaagatgtcaccgtgctttacacggtttttgaaccccacaccggctgtttggcgcttgcaggacagcaggtttattttcttatgttctccatttctagccaacagggttctatcctgttgggcggagtgatactcccgttccttcttggacagattgcctccacgttctttgtggatctcaaggtgatcaagtcactggtgaatagagcgaaggttgaggagacctgaggaatttccatgtggctttgccaggagttgtagcgatgctgtgtgtgtgtgcggatttcccctcatggcaacatgagcctcacaggccaaaagccctgtccgaaaggacccacacagtggagcaaccccagctccctcctacaaagctttgtgagaatgaactcaagtttattctactttattctctatttacatcaggccccaaagatgtcctgaaggtaccttgtgtatctgggcacgagcaccatcagctacccggacttgtatttcggtacagacacatgtggtgacccagcccctctgcttcggcaggggggctttcgctcgctcagcacgagatctgatcaggagcccctcccagtgtgctttacacctggcgaggggttaaaaattgcccaaggcctggcaaaacaacctaggggactaggttttccttttattaataatatctgtcatt

SEQ ID NO: 14238 - RNA, 1193 nt, synthetic construct
  source 1..1193: mol_type = other RNA
aaaaaacaaaaaacaggaggaggaggaggaaaaaaaggaggaggaggaaaacgccataagcaaagcaatcctcctcctcctaaaaaacctcctcctcctcctagccgaaaaacaaaaaacaaaaaaaacaaaaaaaaaaccaaaaaaacaaaatcaaagggggccctggggtcttcatcgcggagatgcgttagcatcttcgcggtgtagaacaccccaggggtaccccctttgaacgcgggacctgcgacagtgccaacccacgtcttttcccacttctgccccgattctcacctcgggtccaatgaaaggaccaaatatttcatcccttgagtgctggctaatcagaggaaagtcagcattttccggcccaggctaagagaaacatataagttagatttgattctgatcccttgacgaattcggaacgagacgttctccctcccttgccacttgttcacacccacattttgattcggccttttgtgacaagtcccttggtgaaagaacctctctctttccgacgtggttggaattaacatcatttccgacgaaagtgctatcatgcctccccgattgtgtgatgttttctgccctgctgggcggagcattctcgggttgagaaaccttgaatcttttcctttggaaccttggttcccccggtctaagccgcttggaatatgacagggttattttccttattcttatttctacttttatgggttctatccataaaaagggtatgtgctgccccttccttctttggagaattcacacggcggcctttccgtctctcgacaagtgtgaatgcagcatgccggaaacggtgaagaaaacagttttctgtggaagttcagagtgcacatcgaaacagctgtagcgacctcacagtagcagcggaaccccctcttggcgacaagagcctctgcggccaaaagccccgtggataagatccactgctgtgagcggtgcaaccccagcaccctgattcgatggtcactctttacggaaccagaaaatggttttctcaagcccttcggtagagaagccaagaatgtcctgaaggtaccccgcgtgcgggatctgatcaggagaccaattgacagtgctatacgctgtcactttggtttaaaaactgtcacagcttctccaaaccaagtggtcttggttttccaattttgttgactggcaat

SEQ ID NO: 14239 - RNA, 981 nt, synthetic construct
  source 1..981: mol_type = other RNA
aaaaaacaaaaaacaggaggaggaggaggaaaaaaaggaggaggaggaaaacgccataagcaaagcaatcctcctcctcctaaaaaacctcctcctcctcctagccgaaaaacaaaaaacaaaaaaaacaaaaaaaaaaccaaaaaaacaaaattttcaaagccggggttgggggggctgcaccccatccccccttcttcccctcttcctccgttgcgcgcgttcctgacgcccgccgcggagttcctagctggctaacacccagttgggagggctctcactccctcacacctcgcgctttggacgccaggcatggcgttaaacatgcattcccttcccctagtaacctcccttcgccccttccccacgttgtaccccctccgagatggctgctaaggcgcttgctgctacagcagtctcgtgtttcgggtgttataagtgctttcttttccactccactccctgcctatggggagcggaacggccttgtctcggtcgttgcttcttgcagatcttcacccctccaggctttctggactcgccaggggtggagtagtaggcgcactgtctaagtgaaggtagcagtgttgttggcgaagagttgtggacctactttgagtttgtagcgatcatccagagctagcggatctccccacgcggtaacgcgtgcctctaggcccaaaaggcacggtgttcacagcaccctttggatggcgggggtgcccccctccgcacttaaagtagaaaaacagcttagtagtcaaataacatggctttcctcaagcattcagtgctacatgggactgaaggatgcccagaaggtacccgcaggcaacgataagctcactgtggatctgatctggggccctgggccaggtgctatacacctggttaaaaccaaatctggtagtcagggttaaaaaacgtctaagtcccacccccccggggacggggggttcccttaaaccctcaactgacacc

SEQ ID NO: 14240 - RNA, 912 nt, synthetic construct
  source 1..912: mol_type = other RNA
aaaaaacaaaaaacaggaggaggaggaggaaaaaaaggaggaggaggaaaacgccataagcaaagcaatcctcctcctcctaaaaaacctcctcctcctcctagccgaaaaacaaaaaacaaaaaaaacaaaaaaaaaaccaaaaaaacaaaaacatgggggagactgcatgtggcagtcttgaaacgtgtggtttgacgtctaccttatatggcagtgggtggagtactgcaaagatgtcaccgtgctttacacggtttttgaaccccacaccggctgtttgacgctcgtagggcagcaggtttattttcattaaaattcttactttctagctgcatgagttctattcatgcagacggagtgatactcccgttccttcttggacaggttgcctccacgccctttgtggatcttaaggtgaccaagtcactggtgttggaggtgaagatagagagtcctcttgggaatgtcatgtggctgtgccaggggttgtagcgatgccattcgtgtgtgcggatttcctctcgtggtgacacgagcctcacaggccaaaagccccgtccgaaaggacccgaatggtggagtgaccctgactcccccctgcatagttttgtgattaggaacttgaggaatttctgtcataaatctctatcacatcaggccccaaagatgtcctgaaggtaccctgtgtatctgaggatgagcaccaccgactacccggacttgcattagcagacacatgtggttgcccagccccacctcttcagaggtggggctttgctcactcagcacaggatctgatcaggagccccgctcgtgtgctttacactcgacgcggggttaaaaattgcccaaggcctggcacaacaacctaggggactaggttttcctatttttgtaaattatgtcaat

SEQ ID NO: 14241 - RNA, 902 nt, synthetic construct
  source 1..902: mol_type = other RNA
aaaaaacaaaaaacaggaggaggaggaggaaaaaaaggaggaggaggaaaacgccataagcaaagcaatcctcctcctcctaaaaaacctcctcctcctcctagccgaaaaacaaaaaacaaaaaaaacaaaaaaaaaaccaaaaaaacaaaattgccagttttttgaaacgtgtggtttgacgtctaaccattatggcagtgggtggagtactgcaaagatgtcaccgtgctttacacggtttttgaaccccacaccggctgtttggcgcttgcaggacagcaggtttattttcttttaactctctctttctagccacacacgatctatgtgtgtgggcggagtgatactcccgttccttcttggacaggcggcctccacgccctttgtggatcttaaggctaccaagtcactggtgttggaaagtgaagagaaaggagttccttgggaactacatgtggcattgacagaggttgtagcgatgctgtgtgtgtgtgcggattacccccgtggcgacacggaccccacaggccaaaagccctgtccgaaaggacccacacagtggagcaaccccagctcccctcttcaatgttttgtgttagcaaccttggtattattttctctcaagcttccaatacaccgggccccaaagatgtcctgaaggtaccccgtgtatctgaggatgagcaccatcaactacccggacttgttctttcgagaacagacgcatgtggtaacccagccccgatcctaaggggtcggggcttttgctcactcagcacaggatctgatcaggagacctcccccccctgctttacagggggcgggggtttaaaaattgcccaaggcctggcaaataacctaggggactaggttttcctttttattttaaagttgtcaat

SEQ ID NO: 14242 - RNA, 901 nt, synthetic construct
  source 1..901: mol_type = other RNA
aaaaaacaaaaaacaggaggaggaggaggaaaaaaaggaggaggaggaaaacgccataagcaaagcaatcctcctcctcctaaaaaacctcctcctcctcctagccgaaaaacaaaaaacaaaaaaaacaaaaaaaaaaccaaaaaaacaaaattaaaacagcttgtgggttgcacccacccacagggcccactgggcgctagcacactgattctacggaatctttgtgcgcctgttttataaccccttcccccaaaactgtaacttagaagaatattacactactgatcaatagcaggcatggcgcgccagtcatgtctagatcaagcacttctgtctccccggactgagtatcaatagactgctagcgcggttgaaggagaaaacgtccgttacccggctaactacttcgagaaacttagtagcaccattgaagctgcggagtgtttcgttcagcactcccccagtgtagatcaggtcgatgagtcactgcactccccacgggcgaccgtggcagtgactgcgttggcggcctgcctatggggcaacccataggacgctctaaagtggacatggtgcgaagagtctattgagctagttagtagtcctccggcccctgaatgcggctaatcccaactgcggagcacatgccctcaatccagagggtggtgtgtcgtaacgggcaactctgcagcggaaccgactactttgggtgtccgtgtttccttttattcttatattggctgcttatggtgacaattgagagattgttaccatatagctattggattggccatccagtgacaaacagagctttgatatacttgtttgtgggttttgttccacttaccagtcgtacagttcatactctaaagtacattctgattctgaacaatagaaa

SEQ ID NO: 14243 - RNA, 901 nt, synthetic construct
  source 1..901: mol_type = other RNA
aaaaaacaaaaaacaggaggaggaggaggaaaaaaaggaggaggaggaaaacgccataagcaaagcaatcctcctcctcctaaaaaacctcctcctcctcctagccgaaaaacaaaaaacaaaaaaaacaaaaaaaaaaccaaaaaaacaaaattaaaacagctctggggttgttcccaccccagaggcccacgtggcggccagtacaccggtatcgcggtacccttgtacgcctgttttatactccctttccccgtaacttagaagcaatgaaaccaagttcaatagaaagggggtacaaaccagtaccaccacgaacaagcacttctgtctccccggtgaggtcgtatagactgttcccacggttgaaaatgactgatccgttatccgctcttgtacttcgagaagcctagtaccaccttggaatcttcgatgcgttgcgctcagcactcaaccccggagtgtagcttgggctgatgagtctggacattccccaccggcgacggtggtccaggctgcgttggcggcctacctgtggcccaaagccacaggacgctagttgtgaacaaggtgtgaagagcctattgagctacatgagagtcctccggcccctgaatgcggctaatcccaaccacggagcaggcgattgcaatccagcaattagcctgtcgtaacgcgtaagtctgtggcggaaccgactactttgggtgaccgtgtttccttttattcttacattggctgcttatggtgacaatcatagattgttatcataaagcgagttggattggccatccagtgagaattagatcgatcatctacctttttgttggatttacacctttaaaaccacacagcttgaatctcatcaaaattgtattgttgatacgacattattatcatt

SEQ ID NO: 14244 - RNA, 900 nt, synthetic construct
  source 1..900: mol_type = other RNA
aaaaaacaaaaaacaggaggaggaggaggaaaaaaaggaggaggaggaaaacgccataagcaaagcaatcctcctcctcctaaaaaacctcctcctcctcctagccgaaaaacaaaaaacaaaaaaaacaaaaaaaaaaccaaaaaaacaaaatggcagtccttgaaacgtgtggtgcgacgtctaaccattatggcagtgggtggagtactgcaaagatgtcaccgtgctttacacggtttttgaaccccacaccggctgtttggcgcttgcaggacagtaggtatattttctttcatttctcttttctagccgcgtaggttctatctacgcgggcggagtgatactcccgctccttcttggacaggcggcctccacgctctttgtggatcttaaggctgccaagtcactggtgtttgaagtgaagaatggagagacactagggcgtttcatgtggctttgccagggattgtagcgatgctgtgtgtgtgtgcggatttcccctcgtggcgacacgagcctcacaggccaaaagccctgtccgaaaggacccacacagtggggttgccccgacccctcccttcaaagctttgtgtaaacaaacttttgtttagactttcttaagcttctctcacatcaggccccaaagatgtcctgaaggtaccctgtgtatctgaggatgagcaccaccaactacccggacttgtgggacgtgtcccacagacgcatgtggtattccagccccctccttttgaggagggggcttttgctcgctcagcacaggatctgatcaggagattcatctctggtgctttacaccagagcatggatttaaaaattgcccaaggcctggcaaacaacctaggggactaggttttctctattttaaaagatgtcaat

SEQ ID NO: 14245 - RNA, 900 nt, synthetic construct
  source 1..900: mol_type = other RNA
aaaaaacaaaaaacaggaggaggaggaggaaaaaaaggaggaggaggaaaacgccataagcaaagcaatcctcctcctcctaaaaaacctcctcctcctcctagccgaaaaacaaaaaacaaaaaaaacaaaaaaaaaaccaaaaaaacaaaattaaaacagcctgtgggttgttcccacccacagggcccactgggcgctagcactctggttctccggaacctttgtgcgcctgttttgaaaccccctcccccaactcgaaacgtagaagtaatgtacactactgatcagtagcaggcgtggcgcaccagccatgtctcgatcaagcacttctgtttccccggactgagtatcaatagactgctcacgcggttgaaggtgaaaacgtccgttacccggctaactacttcgagaaacctagtagcaccatagaaactgcagagtgtttcgctcagcacttcccccgtgtagatcaggtcgatgagtcactgcaatccccacgggtgaccgtggcagtggctgcgttggcggcctgcctatggggcaacccataggacgctctaaggtggacatggtgtgaagagtctattgagctagttagtagtcctccggcccctgaatgcggctaatcctaactgtggagcgcatactcccaaaccagggagcagtgcgtcgtaacgggcaactccgcagcggaaccgactactttgggtgtccgtgtttccttttattcctatactggctgcttatggtgacaattgagagattgttaccatatagctattggattggccatccagtgtgtaatagagcaatcatttaccaatttgttggatttactccattaacccacacgtctctcaacacactacatttcatcttactactgaacactagaaa

SEQ ID NO: 14246 - RNA, 900 nt, synthetic construct
  source 1..900: mol_type = other RNA
aaaaaacaaaaaacaggaggaggaggaggaaaaaaaggaggaggaggaaaacgccataagcaaagcaatcctcctcctcctaaaaaacctcctcctcctcctagccgaaaaacaaaaaacaaaaaaaacaaaaaaaaaaccaaaaaaacaaaatttaaaacagcctgtgggttgtacccacccacagggcccactgggcgttagcacactgattctacggaatctttgtgcgcctgttttatatccctcccctaaaatagtaatttagacgttgaacatttacacgaccaatagtgggcgtggcgcaccagtcacgtcttggtcaagcactcctgttcccccggaccgagtatcaataggctgctcacgtggctgaaggagaaagtgttcgttatccggctaactacttcgggaaacccagtaacaccatgaaagttgcagagtgtttcgttcagcacttcccccgtgtagatcaggctgatgagtcactgcaaaccccacgggcgaccgtggcagtggctgcgttggcggcctgcctatggggtaacccataggacgctctaatacagacatggtgcgaagagtctactgagctagttagtattcctccggcccctgaatgcggctaatcctaactgcggagcacatgccctcaatccagagggtggtgtgtcgtaatgggcaactctgcagcggaaccgactactttgggtgtccgtgtttccttttattcttatactggctgcttatggtgacaattgaaaagttgttaccatatagctattggattggccatccggtgaataacagagctttggtttatcagttcattgggttcgtgcccttatcatctacagcttacacaactttggtgtacttgttatatcttaatagtaagaa

SEQ ID NO: 14247 - RNA, 900 nt, synthetic construct
  source 1..900: mol_type = other RNA
aaaaaacaaaaaacaggaggaggaggaggaaaaaaaggaggaggaggaaaacgccataagcaaagcaatcctcctcctcctaaaaaacctcctcctcctcctagccgaaaaacaaaaaacaaaaaaaacaaaaaaaaaaccaaaaaaacaaaattaaaacagcctgtgggttgtacccacccacagggcccactgggcgctagcacactggtatcacggtacctttgtgcgcctgttttatgcaccctttttccctgtaactcagaagaaacaaacaaacgatcaatagtgggcttagcgctccagctaagtcttgatcaagcacttctgttaccccggaccgagtatcaataggctgtacccacggctgaaagagaaaacgttcgttatccggctatctacttcgggaaacctagtaccatcatgaagattgcaaagcgtttcgctcagcacaaccccagtgtagatcaggtcgatgagtcactgcattccccacaggtgactgtggcagtggctgcgttggcggcctgcctatggggaaacccataggacgctttaatattgacatggtgcgaagagtctactgagctaggtagtagtcctccggcccctgaatgcggctaatcccaaccacggagcaggcgctcacactccagtgagtagcttgtcgtaacgcgaaagtctgtggcggaaccgactactttgggtgtccgtgtttccttttatttttatcatggctgcttatggtgacaatctaagattgttatcatatagctattggattggccatccggtgaattctagagacattatttacttgtttgttggttttaccacactgaacattaccaatcacagaactctcctttacatcttgttgttaaacaatagaaagagaaa

SEQ ID NO: 14248 - RNA, 899 nt, synthetic construct
  source 1..899: mol_type = other RNA
aaaaaacaaaaaacaggaggaggaggaggaaaaaaaggaggaggaggaaaacgccataagcaaagcaatcctcctcctcctaaaaaacctcctcctcctcctagccgaaaaacaaaaaacaaaaaaaacaaaaaaaaaaccaaaaaaacaaaatttaaaacagcctgtgggttgtacccacctacagggcccactgggcgctagcactctgattccacggaatccttgtgcgcctgttttatatcccctccccaagttgcaacttagaagcattgcactacaatgatcagtagcaggcgtggcgctccagccatgtctcgatcaagcacttctgtttccccggaccgagtatcaatagactgctaacgcggttgaaggagaaaacgttcgttatccggctaactacttcgagaaacctagtagcaccatcgaagctgcggggcgtttcgctcagcacttcccccgtgtagatcaggtcgatgagtcactgcaatcctcacgggcgaccgtggcagtggctgcgttggcggcctgcctatggggcaacccataggacgcttcaaagtggacatggtgtgaagagtctattgagctagttagtagtcctccggcccctgaatgcggctaatcctaactgcggagcacataccttcaatccaggaggtagtgtgtcgtaacgggcaactctgcagcggaaccgactactttgggtgtccgtgtttccttttattctcttattggctgcttatggtgacaattgaagaattgttaccatatagctattggattggccatccagtgtctaacagagcaattgtgtacttatttgttggttttgttcctttgtctcacacgtcccttagtactttgtattacattataaaactgaattcggagag

SEQ ID NO: 14249 - RNA, 898 nt, synthetic construct
  source 1..898: mol_type = other RNA
aaaaaacaaaaaacaggaggaggaggaggaaaaaaaggaggaggaggaaaacgccataagcaaagcaatcctcctcctcctaaaaaacctcctcctcctcctagccgaaaaacaaaaaacaaaaaaaacaaaaaaaaaaccaaaaaaacaaaatttaaaacagcctgtgggttgttcccacccacagggcccactgggcgccagcactctggtattgcggtaccttagtgcgcctgttttatatacccatcccccaaacgtgatttagatgcatgttaacgaagaccaatagtaagcgcagcacaccagctgtgttccggtcaagcacttctgttaccccggactgagtatcaataagctactcacgtggctgaaggagaaaacgttcgttacccggccaattacttcgagaaacccagtaacaccatgaaggttgcgcagtgtttcgctccgcacaaccccagtgtagatcaggtcgatgagtcaccgcattccccacgggtgaccgtggcggtggctgcactggcggcctgcccatggggtaacccatgggacgcttcaatactgacatggtgcgaagagtctattgagctaattggtagtcctccggcccctgaatgcggctaatcctaactgcggagcagatactcacataccagtgggcggtctgtcgtaacgggcaactctgcagcggaaccgactactttgggtgtccgtgtttctctttatccttatactggctgcttatggtgacaattgggagattgttaccatatagctattggattggccatccagtgacaaatagagcaatcgtgtatttgtttgttggtttcgtaccattaaattacaaggtcataaacaccctcaatcttattatagcattcaatacaacaaa

SEQ ID NO: 14250 - RNA, 897 nt, synthetic construct
  source 1..897: mol_type = other RNA
aaaaaacaaaaaacaggaggaggaggaggaaaaaaaggaggaggaggaaaacgccataagcaaagcaatcctcctcctcctaaaaaacctcctcctcctcctagccgaaaaacaaaaaacaaaaaaaacaaaaaaaaaaccaaaaaaacaaaattaaaacagctctggggttgtccccacccacagggcccactgggcgctagcacactggttctgcgggacctttgtgcgcctgttttataacccttccctaagcagtaacttagaagctttgtacaatcatggccaatagtgggcgtggcgcgccagtcacgtcttggtcaagcacttctgtatccccggactgagtatcaatagactgctcacgcggttgaaggagaaaacgttcgttacccggctaactacttcgagaaacctagtagcaccatgaaagttgcggagtgtttcgctcagcacttcccccgtgtagatcaggtcgatgagccactgtaaaccccacgggcgaccgtgacagtggctgcgttggcggcctgcccatggggtaacccatgggacgctctaatacagacatggtgcgaagagtctattgagctagttagcagtcctccggcccctgaatgcggctaatcctaactgcggagcgcgcaccttcaacccagggggcggcgcgtcgtaatgggtaactctgcagcggaaccgactactttgggtgtccgtgtttccttttattctttattggctgcttatggtgacaattgaaaagttgttaccatatagctattggattggccatccggtgtctaacagagctattgtttacctattcattggctttgtccctcttaatctcaaggccatccaaactctcgattacatattgctcctcagctgtaagaa

SEQ ID NO: 14251 - RNA, 897 nt, synthetic construct
  source 1..897: mol_type = other RNA
aaaaaacaaaaaacaggaggaggaggaggaaaaaaaggaggaggaggaaaacgccataagcaaagcaatcctcctcctcctaaaaaacctcctcctcctcctagccgaaaaacaaaaaacaaaaaaaacaaaaaaaaaaccaaaaaaacaaaattaaaccagcctgtgggttgttcccacccacagggcccactgggcgctagcacactggtatcccggtacctttgtgcgcctgttttaatcaccccccccccaaacgtaacttagaagtttataactcatggtcaataggcgactcagcataccagctgggtcttgaccaagcactcctgtaaccccggaccgagtatcaataggctgtttgcacggctgaaggagaaaacgtccgttatccgaccaattacttcgagaaacctagtaccaccgtgaaggttgcgcagtgtttcgctccgcacaaccccagtgtagatcaggtcgatgagtcaccgcactcctcacgggcgaccgtggcggtggctgcgctggcggcctgcccatggggcaacccatgggacgcttcaatactgacatggtgtgaagagtctattgagctaattggtagtcctccggcccctgaatgcggctaatcctaactgtggagcagatacccacacgccagtgggcagtctgtcgtaacgggcaactctgcagcggaaccgactactttgggtgtccgtgtttccttttattcttatactggctgcttatggtgacaattgagagattgttaccatatagctactggattggccatccaataacaaacagagcaattgtttatctttttgttggttttgtaccattaaattacaaggttttgaaaaccctcaaattggtcatactgtttaatacagcaaa

SEQ ID NO: 14252 - RNA, 897 nt, synthetic construct
  source 1..897: mol_type = other RNA
aaaaaacaaaaaacaggaggaggaggaggaaaaaaaggaggaggaggaaaacgccataagcaaagcaatcctcctcctcctaaaaaacctcctcctcctcctagccgaaaaacaaaaaacaaaaaaaacaaaaaaaaaaccaaaaaaacaaaatttaaacagctctggggttgttcccaccccagaggcccacgtggcggctagtactctggtatcgcggtacctttgtacgcctgttttatacccctaccccatgtaactttagaagcagttcaacaagttcaatagggggggtgcaaaccagcaccaccacgaacaagcacttctgtaaccccggtgaccttgtataagctgtgcccacggctgaaagcgagtgatccgttatccgcttaagtacttcgagaagcttagtatcaccttggaatcttcgatgcgttgcgctcagcactctatcccgagtgtagcttaggctgatgagtctgggcgttccccaccggcgacggtggcccaggctgcgttggcggcctacccatggctaacgccatgggacgctagatgtgaacaaggtgtgaagagcctattgagctacttaagagtcctccggcccctgaatgcggctaatcccaaccacggagcaggtgccttcaacccagagggcggcctgtcgtaacgcgcaagtctgtggcggaaccgactactttgggtgtccgtgtttccttttatcttttatatggctgcttatggtgacaatcatagattgttatcataaagcgacttggattggccatccggtaaaatacaaacacatcatctacttgtttgttggatttactccactcacccaatttactcccagcataatatccattgttttgttaacaagacattgctatcacg

SEQ ID NO: 14253 - RNA, 896 nt, synthetic construct
  source 1..896: mol_type = other RNA
aaaaaacaaaaaacaggaggaggaggaggaaaaaaaggaggaggaggaaaacgccataagcaaagcaatcctcctcctcctaaaaaacctcctcctcctcctagccgaaaaacaaaaaacaaaaaaaacaaaaaaaaaaccaaaaaaacaaaaataaaacagcctgtgggttgttcccacccacagggcccaccgggcgctagcacactggtatctcggtacctttgtgcgcctgttttatccacccttttcccatttaatttagaagcacgcgccaagacggtcgatagggagcccagtaagccaattgggctgtgaccaagcacttctgtaaccccgggccgagtatcaataagctgctcgcgcggctgaaagagaaaaagctcgttacccggccaattacttcgagaaacctagtagcatcatgaaagttgcgcagcgtttcgctccacacaaccccagtgtagatcaggccgatgagtcaccgcgttccccacgggtgaccgtggcggtggctgcgatggcggcctgcccatggggccacccatgggacgcttcaatactgacatggtgtgaagagtctattgagctaattggtagtcctccggcccctgaatgcggctaatcctaactgcggagcagatgcccacgcaccagtgggaagtctgtcgtaacgggtaactctgcagcggaaccgactactttgggtgtccgtgtttccttttatttctactctggctgcttatggtgacaattgaaaggttgttaccatatagccattggattggccatccggtgtcaaatagagcgattatttattcgtttgttgggtttgtaccactgaattacaaagccttaaacactcttaactacattttaatccttaactcatcaaa

SEQ ID NO: 14254 - RNA, 896 nt, synthetic construct
  source 1..896: mol_type = other RNA
aaaaaacaaaaaacaggaggaggaggaggaaaaaaaggaggaggaggaaaacgccataagcaaagcaatcctcctcctcctaaaaaacctcctcctcctcctagccgaaaaacaaaaaacaaaaaaaacaaaaaaaaaaccaaaaaaacaaaattaaaacagcctgtgggttgttcccacccgcagggcccactgggcgctagcacactggtatcacggtacttttgtgcgcctgttttatccacccttccccgaatgaaacttagaagtttgaattaaacggtcaataggaaacccagtacaccaactgggtcatgaccaagcacttctgtgaccccggaccgagtatcaataagctactcacgtggctgaaggagaaaacgttcgttacccggccaattacttcgagaaacttagtaccaccatgaaagttgcgcagcgtttcgctccgcacgaccccagtgtagatcaggctgatgagtcaccgcgttccccacgggtgaccgtggcggtggctgcgttggcggcctgcccttggggcaacccaagggacgcttcaatactgacatggtgcgaagagtctattgagctaattggtagtcctccggcccctgaatgcggctaatcccaactgcggagcagatacccacatgccagtgggcagtctgtcgtaatgggcaactctgcagcggaaccgactactttgggtgtccgtgtttcctttatttcttacactggctgcttatggtgacaattgagagattgttgccatatagctattggattggccatccggtgtctaatagagcaattatctacctttttgttggatttattccactcaactataaagtactcaaaacacttacatacattgtagatctcaacacaacaaa

SEQ ID NO: 14255 - RNA, 896 nt, synthetic construct
  source 1..896: mol_type = other RNA
aaaaaacaaaaaacaggaggaggaggaggaaaaaaaggaggaggaggaaaacgccataagcaaagcaatcctcctcctcctaaaaaacctcctcctcctcctagccgaaaaacaaaaaacaaaaaaaacaaaaaaaaaaccaaaaaaacaaaatgtgctcttccgatctggttgttcccacccacagggcccactgggcgccagcacactggtattacggtacccttgtgcgcctgttttatccacccccccccactgtaacttagaagataaccacacgcggtcaataggtgactcagtacgccaactgggtcgcgaccaagcacttctgttaccccggaccgagtatcaataagctgctcgcgcggctgaaggagaaaacgttcgttacccggccaattacttcgagaaacctagtaccaccatggaggttgcgcagcgtttcgctccgcacaaccccagtgtagatcaggtcgatgagtcaccgcaatccccacaggcgactgtggcggtggctgcgttggcggcctgcccatggggaaacccatgggacgcttcaatatcgacatggtgcgaagagtctattgagctaattggtagtcctccggcccctgaatgcggctaatcctaactgtggagcagatacccacactccagtgggcagtctgtcgtaatgggcaactctgcagcggaaccgactactttgggtgtccgtgtttccttttattcctatgctggctgcttatggtgacaattgacagattgttaccatatagctactggattggccatccggtgacaagcagagcgattgtttacttatttgttggtttcattccactcaattataaagtactaaacacccttaatttcattataactcttaacacgttaaa

SEQ ID NO: 14256 - RNA, 896 nt, synthetic construct
  source 1..896: mol_type = other RNA
aaaaaacaaaaaacaggaggaggaggaggaaaaaaaggaggaggaggaaaacgccataagcaaagcaatcctcctcctcctaaaaaacctcctcctcctcctagccgaaaaacaaaaaacaaaaaaaacaaaaaaaaaaccaaaaaaacaaaattaaaacagcctgtgggttgttcccacccacagggcccacgtggcgttagcacactggtatcccggtacctttgtgcgcctgttttatacaccccaaaccccaatgtaaattagaagaaaataacaccgatcaatagtgggtgtggcacaacagccacatcatgatcaagcactactgttcccccggactgagtatcaataagctgctcgcgcggctgaaggagaaaacgttcgttatccggccaattacttcgagaaacctagtaccaccatgaaggttgcgcagtgtttcgctccacacaaccccagtgtagatcaggtcgatgagtcaccgcattccccacaggcgactgtggcggtggctgcgctggcggcctgcccatggggtgacccatgggacgcttcaatactgacatggtgtgaagagtctattgagctaattggtagtcctccggcccctgaatgcggctaatcctaactgcggagcagatacccacgcaccagtgggtagtctgtcgtaacgggtaactctgcagtggaaccgactactttgggtgtccgtgtttccttttattctcacattggctgcttatggtgacaattgaaagattgttaccatatagctactggattggccatccggtgacaaacagagcaattgtgttcctcttcgatgggttcatacctctcaacaagatcagctttcgaactttgtgctacatcatcaagctaaacacaacaaa

SEQ ID NO: 14257 - RNA, 895 nt, synthetic construct
  source 1..895: mol_type = other RNA
aaaaaacaaaaaacaggaggaggaggaggaaaaaaaggaggaggaggaaaacgccataagcaaagcaatcctcctcctcctaaaaaacctcctcctcctcctagccgaaaaacaaaaaacaaaaaaaacaaaaaaaaaaccaaaaaaacaaaattaaaacagcctgtgggttgatcccacccacagggcccattgggcgctagcactctggtatcacggtacctttgtgcgcctgttttataccccctcccccaactgtaacttagaagtaacacacaccgatcaacagtcagcgtggcacaccagccacgttttgatcaagcacttctgttaccccggactgagtatcaatagactgctcacgcggttgaaggagaaagcgttcgttatccggccaactacttcgaaaaacctagtaacaccgtggaagttgcagagtgtttcgctcagcactaccccagtgtagatcaggtcgatgagtcaccgcattccccacgggcgaccgtggcggtggctgcgttggcggcctgcccatggggaaacccatgggacgctctaatacagacatggtgcgaagagtctattgagctagttggtagtcctccggcccctgaatgcggctaatcctaactgcggagcacacaccctcaagccagagggcagtgtgtcgtaacgggcaactctgcagcggaaccgactactttgggtgtccgtgtttcattttattcctatactggctgcttatggtgacaattgagagattgttaccatatagctattggattggccatccggtgaccaatagagctattatatatctctttgttgggtttataccacttagcttgaaagaggttaaaacattacaattcattgttaagttgaatacagcaaa

SEQ ID NO: 14258 - RNA, 895 nt, synthetic construct
  source 1..895: mol_type = other RNA
aaaaaacaaaaaacaggaggaggaggaggaaaaaaaggaggaggaggaaaacgccataagcaaagcaatcctcctcctcctaaaaaacctcctcctcctcctagccgaaaaacaaaaaacaaaaaaaacaaaaaaaaaaccaaaaaaacaaaattaaaacagctctggggttgttcccacccacagggcccaccgggcgccagcactctggtatcacggtacctttgtgcgcctgttttatacccccgtccccggttgtaacttagaagtaacactccacgaccgatagtaggtgtggcacgccagccatgtcttggtcaagcacttctgtttccccggattgagtatcaataggctgttcacacggccgaaggagaaaacatccgttatccggccaactacttcgagaaacctagtaccaccatgaaggttgcgcagtgtttcgctccgcacaaccccagtgtagatcaggccgatgagtcaccgctttccccacgggcgaccgtggcggtggctgcgttggcggcctgcccatggggaaatccatgggacgcttcaatactgacatggtgcgaagagtctattgagctagttggtattcctccggcccctgaatgcggctaatcctaactgcggagcagacacccacatgccagtgggcagtctgtcgtaacgggcaactctgcagcggaaccgactactttgggtgtccgtgtttccttttattcttatactggctgcttatggtgacaattgaaagattgttaccatatagctattggattggccatcctgtgactaacagagctattgtatacctatttgttggttttgtgccactgaattacaaggctttaaacaccctcaactttataatactactcaactcattaaa

SEQ ID NO: 14259 - RNA, 889 nt, synthetic construct
  source 1..889: mol_type = other RNA
aaaaaacaaaaaacaggaggaggaggaggaaaaaaaggaggaggaggaaaacgccataagcaaagcaatcctcctcctcctaaaaaacctcctcctcctcctagccgaaaaacaaaaaacaaaaaaaacaaaaaaaaaaccaaaaaaacaaaagtgggttgcacccactcacaggacccacgcggtgctagcactctggttccacgggacctttgtgcgcctgttttatgtcccctcccccaatttgtaacttagaagcaatttgcaacactgatcagtagcaggcatagcgcaccagctatgtcttgatcaagcacttctgtttccccggaccgagtatcaatagactgtttacacggttgaaggagaaagcgtccgttatccggctaactacttcgagaaacccagtagcaccattgaaactacagagtgtttcgctccacacttcccccgtgtagatcaggtcgatgagtcactgcaatccccacgggcgaccgtggcagtggctgcgctggcggcctgcctatggggcaacccataggacgctctaatgtggacatggtgtgaagagtctattgagctagttagtagtcctccggcccctgaatgcggctaatcccaactgcggagcacatgccttcaacccagagggtagtgtgtcgtaatgggcaactctgcagcggaaccgactactttgggtgtccgtgtttccttttattctcacattggctgcttatggtgacaatcacagaattgttaccatatagctattggattggccatccggtgtgcaatagagctattatatacctatttgttggctttgtaccactgaccttaaaatctttaaccactcttgagtgtatattaacccttaatacaattaaac

SEQ ID NO: 14260 - RNA, 887 nt, synthetic construct
  source 1..887: mol_type = other RNA
aaaaaacaaaaaacaggaggaggaggaggaaaaaaaggaggaggaggaaaacgccataagcaaagcaatcctcctcctcctaaaaaacctcctcctcctcctagccgaaaaacaaaaaacaaaaaaaacaaaaaaaaaaccaaaaaaacaaaattaaaacagctctggggttgttcccaccccagaggcccacgtggcggctagtacaccggtatcacggtacccttgtacgcctgttttatactcccttcccccgtaacttaraagctacaaatccaagttcaatagaagggggtacaagccagtaccaccacgaacaagcacttctgtttccccggtgaagtaacataggctgtacccacggctgaaagcaactgatccgttatccgctcttgtacttcgagaagcctagtaccaccttggaatcttcgatgcgttgcgctcagcactcaaacccagagtgtagcttaggctgatgagtctggacaatcctcaccggtgacggtggtccaggctgcgttggcggcctacctgtggcccaaagccacaggacgctagttgtgaacaaggtgtgaagagcctattgagctacatgagattcctccggcccctgaatgcggccaatcccaaccgcggagcaggtggttgcaacccagcaaccggcctgtcgtaatgcgcaagtctgcggcggaaccgactactttgggtgtccgtgtttcctttatttcttataatggctgcttatggtgacaatcacagattgttrtcataaagcgaattggattggccatccggtgaaagttaaatcaattatccacctatttgttggattcgttccattggattcatacactttgcacttgattagttacgacagcatcatcaca

SEQ ID NO: 14261 - RNA, 883 nt, synthetic construct
  source 1..883: mol_type = other RNA
aaaaaacaaaaaacaggaggaggaggaggaaaaaaaggaggaggaggaaaacgccataagcaaagcaatcctcctcctcctaaaaaacctcctcctcctcctagccgaaaaacaaaaaacaaaaaaaacaaaaaaaaaaccaaaaaaacaaaaacatggggggtctgcggacggcttcggcccacccgcgacaagaatgccgtcatctgtcctcattacccgtattccttcccttcccccgcaaccaccacgcttactcgcgcacgtgttgagtggcacgtgcgttgtccaaacagctacacccacacccttcggggcgggtttgtcccgccctcgggttcctcgcggaacccccccctccctctctctctttctatccgccctcacttcccataactacagtgctttggtaggtgagcaccctgaccccccgcggaagctgctaacgtggcaactgtggggatccaggcaggttatcaaaggcacccggtctttccgccttcaggagtatctctgccggtgaattccggtagggctctgcttggtgccaacctcccccaaatgcgcgctgcgggagtgctcttccccaactcatcttagtaacctctcatgtgtgtgcttggtcagcatatctgaggcgacgttccgctgtcccagaccagtccagcaatggacgggccagtgtgcgtagtcgctttccggttttccggcgcatgtttggcgaaacgctgaggtaaggttggtgtgcccaacgcccgtaatttggtgatacctcaagaccacccaggaatgccagggaggtaccccacttcggtgggatctgaccctgggctaattgtctacggtggttcttcttgcttccacttctcttttttctggcatg

SEQ ID NO: 14262 - RNA, 871 nt, synthetic construct
  source 1..871: mol_type = other RNA
aaaaaacaaaaaacaggaggaggaggaggaaaaaaaggaggaggaggaaaacgccataagcaaagcaatcctcctcctcctaaaaaacctcctcctcctcctagccgaaaaacaaaaaacaaaaaaaacaaaaaaaaaaccaaaaaaacaaaatttcgaccgccttatggcaggcgggcttgtggacggcttcggcccacccacagcaagaatgccatcatctgtcctcacccccatttctcccctccttcccctgcaaccattacgcttactcgcatgtgcattgagtggtgcacgtgttgaacaaacagctacactcacgtgggggcgggttttcccgcccttcggcctctcgcgaggcccacccttccccttcctcccataactacagtgctttggtaggtaagcatcctgatcccccgcggaagctgctcgcgtggcaactgtggggacccagacaggttatcaaaggcacccggtctttccgcctccaggagtatccctgctagtgaattctagtggggctctgcttggtgccaacctcccccaaatgcgcgctgcgggagtgctcttccccaactcaccctagtatcctctcatgtgtgtgcttggtcagcatatctgagacgatgttccgctgtcccagaccagtccagcaatggacgggccagtgtgcgtagtcgtcttccggcttgtccggcgcatgtttggtgaaccggtggggtaaggttggtgtgcccaacgcccgtactttggtgacaactcaagaccacccaggaatgccagggaggtaccccgcctcacggcgggatctgaccctgggctaattgtctacggtggttcttcttgcttccatttctttcttctgttc

SEQ ID NO: 14263 - RNA, 865 nt, synthetic construct
  source 1..865: mol_type = other RNA
aaaaaacaaaaaacaggaggaggaggaggaaaaaaaggaggaggaggaaaacgccataagcaaagcaatcctcctcctcctaaaaaacctcctcctcctcctagccgaaaaacaaaaaacaaaaaaaacaaaaaaaaaaccaaaaaaacaaaatcaccctctttcccggtggtctggtcccggaccaccgttactccattcagcttcttcggaacctgttcggaggaattaaacgggcacccatacatccccatcccctttctgtaacttaagtatgtgtgcttgtaatcttgactcccacggaatggatcgatccgctggagaacaaactgctagatccacatcctcccttcccctgggaggaccttggtcctcccacatcctccccccagcctgacgtaccacaggctgtgtgaagcccccgcgaaagctgctcacgtggcaattgtgggtccccccttcatcaagacaccaggtctttcctccttaaggctagccccgatgtgtgaattcacattgggcaactagtggtgtcactgtgcgctcccaatctcggccgcggagtgctgttccccaagccaaacccctggcccttcactatgtgcctggcaagcatatctgagaaggtgttccgctgtggctgccagcctggtaacaggtgccccagtgtgcgtaaccttcttccgtctccggacggtagtgattggttaagatttggtgtaaggttcatgtgccaacgccctgtgcgggatgaaatctctactgccctaggaatgccaggcaggtaccccaccctcgggtgggatctgagcctgggctaattgtctacgggtagtttcatttccaatccttttatgtcggagtc

SEQ ID NO: 14264 - RNA, 862 nt, synthetic construct
  source 1..862: mol_type = other RNA
aaaaaacaaaaaacaggaggaggaggaggaaaaaaaggaggaggaggaaaacgccataagcaaagcaatcctcctcctcctaaaaaacctcctcctcctcctagccgaaaaacaaaaaacaaaaaaaacaaaaaaaaaaccaaaaaaacaaaattaaaacagccttggggttgttcccactccaagggcccacgtggcggctagtactctggtatttcggtacctttgtacgcctgttttatctcccttcccaatgtaacttagaagttttcaaatcgaagctcagtaggtggggcgcaaaccagcgctttcatgagcaagcacttctgttaccccggtgcggttgtatagactgtttccacggttgaaaacaacttatccgttatccgctatagtacttcgagaaacctagtatcacctttggattgttgatgcgttgcgctcagcacactaacccgtgtgtagcttgggctgatgagtctggacgtaccccactggtgacagtggtccaggctgcgttggcggcctactcatggtgaaaaccatgagacgctagacatgaacaaggtgtgaagagtctattgagctactatagagtcctccggcccctgaatgcggctaatcttaaccatggagcaagtgctcacaagccagtgagttgcttgtcgtaacgcgcaagtccgtggcggaaccgactactttgggtgtccgtgtttcactttttacctttatgactgcttatggtgacaatttaatattgttaccatttagcttgtcagattaatcgcgtgaaatcctaaatcttgttcaccaatttgcattcggatagcttcatttgaaaattctaaactcattcataaag

SEQ ID NO: 14265 - RNA, 858 nt, synthetic construct
  source 1..858: mol_type = other RNA
aaaaaacaaaaaacaggaggaggaggaggaaaaaaaggaggaggaggaaaacgccataagcaaagcaatcctcctcctcctaaaaaacctcctcctcctcctagccgaaaaacaaaaaacaaaaaaaacaaaaaaaaaaccaaaaaaacaaaagaaaggggtctcctagagagcttggccgtcgggccttataccccgacttgctgagtttctctaggagagtccctttcccagccctgaggcggctggataataaaggcctcacatgtaacaaacatctaagacaaaataatttgccttgcacctggtccccactagttgaaggcatctagcaataagatgagtggaacaaggacgcttaaagtgcaatgatagttatcttttctaacccactatttatagtggggtggtggatggcgcaccataattctaatagtgagataccacgcttgtggaccttatgctcacacagccatcctctagtaagtttgtgagacgtctggtgacgtgtgggaacttactggaaacaatgctttgccgtaaggctttcattagccagcggaccaccacctggtaacaggtgcctctggggccaaaagccaaggtttaatagaccctaatggaatggttcaaacctggagcattgtggaaagtacttagtacctgctgatctggtagtaatgcaaacactagttgtacggcccacgaaggatgcccagaaggtacccgtaggtaacaagtgacactatggatctgatctggggccaactacctctatcttggtgagttggttaaaaaacgtctagtgggccaaacccaggggggatccctggtttccttttattttactttgtcaat

SEQ ID NO: 14266 - RNA, 853 nt, synthetic construct
  source 1..853: mol_type = other RNA
aaaaaacaaaaaacaggaggaggaggaggaaaaaaaggaggaggaggaaaacgccataagcaaagcaatcctcctcctcctaaaaaacctcctcctcctcctagccgaaaaacaaaaaacaaaaaaaacaaaaaaaaaaccaaaaaaacaaaaggggttgttcccaccctagaggcccacgtggcggccagtactctggtatcacggtacctttgtacgcctgttttatatccctttccccgtaacttagaagaaaacaattcaagttcactaggagggggtacaaaccagtaccaccacgaacaagcacttctgtttccccggtgatgttgtataaactgtacccacggttgaaaacgactgatccgttatccgctcttgtacttcgagaagcccagtatcaccttgggatcttcgatgcgttgcgttcagcactcaaccccagagtgtagcttaggtcgatgagtctggacactccccaccggcgacggtggtccaggctgcgttggcggcctacctgtggcccaaagccacaggacgctagttgtgaacaaggtgtgaagagcctattgagctacaagagagtcctccggcccctgaatgcggctaatcctaaccacggagcaagagtgcacaaaccagtacatgtcttgtcgtaacgcgcaagtctgtggcggaaccgactactttgggtgtccgtgtttccttttatttttatcatggctgcttatggtgacaatctaagattgttatcatatagctattggattggccatccggtaattcgttgagatttgagcatttgcttattcctttaacaattttaactgttcactacactccaacagtcaaa

SEQ ID NO: 14267 - RNA, 842 nt, synthetic construct
  source 1..842: mol_type = other RNA
aaaaaacaaaaaacaggaggaggaggaggaaaaaaaggaggaggaggaaaacgccataagcaaagcaatcctcctcctcctaaaaaacctcctcctcctcctagccgaaaaacaaaaaacaaaaaaaacaaaaaaaaaaccaaaaaaacaaaacaccccagaggcccacgtggcggctagtactctggtatcacggtacctttgtacgcctgttttatatcccttcccccgtaactttagaagcttaacaaaagttcaatagaaggggtgcaaaccagtacctccacgaacaagcacttctgtctccccggtgaagtcacatagactgtacccacggtcaaaagtgattgatccgttatccgcttgagtacttcgagaagcctagtatcaccttggaatcttcgatgcgttgcgctcaacactctaccccgggtgtagcttaggctgatgagtctgggcatcccccaccggtgacggtggcccaggctgcgttggcggcctacccatggctaacgccatgggacgctagttgtgaacaaggtgtgaagagcctattgagctactcaagaatcctccggcccctgaatgcggctaatcccaaccacggagcaatcgctcacgatccagtgagtaggttgtcgtaatgcgcaagttcgtggcggaaccgactactttgggtgtccgtgtttccctttttacttatactggctgcttatggtgacaatttacagattgttaccatatagctattggattggccatccagtattgtgttacatatattaaagtacttttccacaagcaacaactacattgtgtttgaaccacaatagccactacaa

SEQ ID NO: 14268 - RNA, 837 nt, synthetic construct
  source 1..837: mol_type = other RNA
aaaaaacaaaaaacaggaggaggaggaggaaaaaaaggaggaggaggaaaacgccataagcaaagcaatcctcctcctcctaaaaaacctcctcctcctcctagccgaaaaacaaaaaacaaaaaaaacaaaaaaaaaaccaaaaaaacaaaacctcttggaagtccatggtgaggggacctgatacctcaccgccgtttgcctaggctataggctatttgtccctttccctctcccctgttttgtgtaaatattaattcctgcaggttcagggttctttaatctgtttctctataagaacactcattttcacgctttctgtctgctttcttccagggctctccccttgccctaggctctggccgttgcgcccggcggggtcaactccatgattagcatggagctgtaggagtctaaattggggacgcagatgtttgggacgtcaccttgcagtgttaacttggctctcatgaaactctttgatcttccacaagaggtaggctacgggtgaaacctcttaagctagtacttctatgaagagatgctttggatagggtaacagcggcggatattggtgagttgttaagacaaaaacctttcaacgccggaggactggctctcatccagtggatgcattgagtggattgtttgtcagggctgtctctaggcttaatctcagacctctctgcgcttagggcaaacattacttggccttaaatgggatcctgtgagaggggatccctccattgactgctggacttttctttggggccttaggtagtgtttgcctctgaggtactcaggggcatttaggtttttcctcactcttaaataatt

SEQ ID NO: 14269 - RNA, 831 nt, synthetic construct
  source 1..831: mol_type = other RNA
aaaaaacaaaaaacaggaggaggaggaggaaaaaaaggaggaggaggaaaacgccataagcaaagcaatcctcctcctcctaaaaaacctcctcctcctcctagccgaaaaacaaaaaacaaaaaaaacaaaaaaaaaaccaaaaaaacaaaacgggccttataccccgacttgctgagcttctctaggagagtccctttcccagccctgaggcggctggtcaataaaagcctcaattgtaacaaacatctaagattattaaattaaccccatgcctggtctccactagttgaaggcaacttgcaataaaatgagtggaaacaagacgcttaaagcatggtgtaaattaatttttctagcccacactttgtgtggggtggcagatggcgtgccataattctattagtgagataccacgcttgtggaccttatgctcacacagccatcctctagtgagtttgtgcgacgtctggtgacgtgtgggaacttattggaaacaacattttgctgtaaagcatcctattgccagcggaacaacacctggtaacaggtgcctctggggccaaaagccaaggtttaacagaccctttaggattggttataaacctgaaatgttgtggaagatacttagtacctaccgatctggtagtagtgcaaacactagttgtaaggcccacgaaggatgcccagaaggtacccgtaggtaacaagagacactatggatctgatctggggccaactacctctatcttggtgagttggttaaaaaacgtctagtgggccaaacccaggggggatccctggtttccttttattttatcaattttcact

SEQ ID NO: 14270 - RNA, 822 nt, synthetic construct
  source 1..822: mol_type = other RNA
aaaaaacaaaaaacaggaggaggaggaggaaaaaaaggaggaggaggaaaacgccataagcaaagcaatcctcctcctcctaaaaaacctcctcctcctcctagccgaaaaacaaaaaacaaaaaaaacaaaaaaaaaaccaaaaaaacaaaatttttaaaacagcctgggggttgtttccccctccgaggtcccctggacgcccgtaccccggcatcacggtgcccttgtatgcctgttttataatcccccccccccgcaactttagaagaaaacgaactccgagctcagtaggcgtcacgtttccagcgtgactacgagcaagcacttctgtttccccggttgcgccctatatgctgtgtgaacggcagaaaggggcaaaatcgttatccgcttgattactgcgggacgcctagtatcactatggattgacttgagggttgcgctcagcacatccccagtgtagcttgggccgatgaggctccgaattccccacgggcgaccgtgtcggagcctgcgttggcggcctacccgcgcctcacggcgtgggacgctcatttcatgacatggtgcgaagagtctactgcgctaatcaaggctcctccggcccctgaatgtggctaatcctaaccactgatcctgtgagcacacgccagtgcccagcaggtcgtaatgcgcaagtcggtggcggaaccaactactttgggtgtccgtgtttcctttatttcctcattgaatgcttatggtgacaattgttgagtacagttgttaccattactgcactctgcaaatagtgaataaaccacgcaacaatataacaca

SEQ ID NO: 14271 - RNA, 794 nt, synthetic construct
  source 1..794: mol_type = other RNA
aaaaaacaaaaaacaggaggaggaggaggaaaaaaaggaggaggaggaaaacgccataagcaaagcaatcctcctcctcctaaaaaacctcctcctcctcctagccgaaaaacaaaaaacaaaaaaaacaaaaaaaaaaccaaaaaaacaaaattaaaacagccgtgtggttgtacccaccaccggacacactgtgtgttgtgcactggaatctcggttcctttgcatgcctgttttaaaccccccttcccccactctttctatcattcttttcttcctaatgtaacttagacgttataccacagtccaataggacgtggccaatccaggccatgacggacaagcacttctgtctccccgggcgtgtgaataggcctcaacaaggctgaagctgtagcgctcgttatccgcatttgtactacgcgatggctagtatcatccttctcttggtcttggcgtttcgctcagcgtggtaaccccccacgtagatcagggcaatgaggctgcatatgccccaccggcgacggtgatgcagcctgcgtggtgccccgcctgggttaacccccaggacgccacaatcaagacagggtgagaagacctgagtgtgctacagatgagtcctccggcccctgaatgcggctaatcctaaccctgcagctatcgtatgcaaaccagcatattggtagtcgtaacgagcaattgcgggacggaaccgactactttgggtgtccgtgtttctctttttatttgaaatgttgcttatggttacaagttttggtattaaacttgtgacc

SEQ ID NO: 14272 - RNA, 786 nt, synthetic construct
  source 1..786: mol_type = other RNA
aaaaaacaaaaaacaggaggaggaggaggaaaaaaaggaggaggaggaaaacgccataagcaaagcaatcctcctcctcctaaaaaacctcctcctcctcctagccgaaaaacaaaaaacaaaaaaaacaaaaaaaaaaccaaaaaaacaaaattaaaactgggtgtgggttgttcccactcacaccacccaatgggtgttgtactctgttattccggtaactttgtacgccagttttccctcccttctccccctcctacccttttacgtaacttagaagctttaaacatgagaccaatagcaggcaactttccaggttgtctaaggtcaagcacttctgtttccccggttgacgttgatatgctccaacagggcaaaaacaactgatatcgttatccgcaaagtgcctacacagagcctagtaggattctgaaagatctttggttggtcgctcagctgcatacccagcagtagacctcgcagatgaggctggacattccccactggtaacagtggtccagcctgcgtggctgcctgcacacctcttacgaggtgtgaagccaaggattcgacagggtgtgaagagccgcgtgtgctcactttgagtcctccggcccctgaatgcggctaaccttaaacctgcagccatagctcataagccaatgagtttatggtcgtaatgagtaattgcgggatgggaccgactactttgggtgtccgtgtttcattttttccttttatcaattgcttatggtgacaatatatatatatatatatattggcatc

SEQ ID NO: 14273 - RNA, 777 nt, synthetic construct
  source 1..777: mol_type = other RNA
aaaaaacaaaaaacaggaggaggaggaggaaaaaaaggaggaggaggaaaacgccataagcaaagcaatcctcctcctcctaaaaaacctcctcctcctcctagccgaaaaacaaaaaacaaaaaaaacaaaaaaaaaaccaaaaaaacaaaattaaaacagcggatgggtatcccaccatccgacccactgggtgtagtacyctggtattatgtacctttgtacgcctgtttctccctccctactaccccgcctcaagcatcctgtaacttagaagaattgaaaaaccgcacaacaggagctattacaaccagtaatagttagtgcaagcacttctgtttccccggagcggagtatagacggccaccgctgtcaaaagctcttaaccgttatccgccagttaactacgtaacggctagtaacatcttgttgtgcttagggtgttcgatcaggtgaagaaaaacccccttcactagtctggtcgatgaggctgagaagtccccacgggcgaccgtgtctcagcctgcgtggcggccagcccagcatatgctgggacgccttaagtatgacatggtgtgaagacccgcatgtgcttaactgtgagtcctccggcccctgaatgcggctaacctaaaccctggagccttggagcacaagccagtgcttacaaggtcgtaatgagcaattccgggacgggaccgactactttgggtgtccgtgtttccttttatctcattattgttcttatggttacaatatatagagtatattgtaatc

SEQ ID NO: 14274 - RNA, 771 nt, synthetic construct
  source 1..771: mol_type = other RNA
aaaaaacaaaaaacaggaggaggaggaggaaaaaaaggaggaggaggaaaacgccataagcaaagcaatcctcctcctcctaaaaaacctcctcctcctcctagccgaaaaacaaaaaacaaaaaaaacaaaaaaaaaaccaaaaaaacaaaattaaaactgagtgtgggttgctcccacccacactgtctacgggacgttgtactcttgtattccggtacacttgtacgccagtttgccaccctaaataccccgtaacaatagaagtctacgcacacttagaccaatagggggtgttcatccagttcacccaaggtcaagcacttctgtttccccggcataggggtgttaggcttcacccgaggccaaagctctgattgtcgttatccgcacaactactggacaaagcctagtagcgccctacgatgtagtatggttggttgttccgccagtatcccctggtaaacctggcagatggggctagaagttcctcactggcgacagtgttctagcccgcgtggctgcctgctccctcacgggagaagccattctactgacaaggtgtgaagagccccgtacgctagttgtgattcctccggcccctgaatgcggctaatccaaccctgcagccattacatggaagccaccatgtggatggtcgtaatgagtaattgcgggacggaaccgactactttgggtgtccgtgtttcttgtttttcttttactgacgtttatggtgacaatatatatataacgtatatattgttcatc

SEQ ID NO: 14275 - RNA, 770 nt, synthetic construct
  source 1..770: mol_type = other RNA
aaaaaacaaaaaacaggaggaggaggaggaaaaaaaggaggaggaggaaaacgccataagcaaagcaatcctcctcctcctaaaaaacctcctcctcctcctagccgaaaaacaaaaaacaaaaaaaacaaaaaaaaaaccaaaaaaacaaaattaaaactggatctgggttgttcccacccagatcacctacatggtgttgtacactattattacggtaattttgtacgccagttttatatccccttccccaaatgtaacttagaagcaatgcaaactgatcaatagggggcaatcatccagattgctaatgatcaagcacttctgtttccccggtcaaggttgatatgctccacaagggcaaaaacaaccgagatcgttatccacaagatgcctacgcaaagcctagtaatgcttttgaagatacttggttggtcgctcagctgtgcacccgacagtagacctggcagatgaggctagaagtacccctctggcgacagagttctagcctgcgtggctgcctgcacacccttttgggtgtgaagccaagtattggacaaggtgtgaagagccccgtgtgctcatcttgaatcctccggcccctgaatgtggctaaccttaaacctgcagccagtgcacacaaaccagtgtgtagctggtcgtaatgagcaattgcgggatgggaccaactactttgggtgtccgtgtttcactttttacctttatattgcttatggtgacaatatatatagcacatatatattgttatc

SEQ ID NO: 14276 - RNA, 769 nt, synthetic construct
  source 1..769: mol_type = other RNA
aaaaaacaaaaaacaggaggaggaggaggaaaaaaaggaggaggaggaaaacgccataagcaaagcaatcctcctcctcctaaaaaacctcctcctcctcctagccgaaaaacaaaaaacaaaaaaaacaaaaaaaaaaccaaaaaaacaaaattaaaactggatctaggttgtccccacctagatctcccatgtggagtggtactctattattccggtaatcttgtacgccagttttatatcccctcccccttttgtaacttagaagttatgaacatagaccaataggtggtgatcatccagatcacttaaggtcaagcacttctgtttccccggtcgacgttgatatgctccaccagggcaaaaacaacagagatcgttatccgcaaggtgcctacacaaagcctagtaaccccttggagagtatgtggttggtcgctcagctattccccatagtagacctggcagatgaggctagaaattccccactggtaacagtgttctagcctgcgtggctgcctgcgcactcttatgagtgcgaagccatatatttgacaaggtgcgaagagccccgtgtgctcaccttgagtcctccggcccctgaatgtggctaaccctaaccctgcagctagtgcatgaaatccatcatgttgctagtcgtaatgagtaattgcgggatgggaccaactactttgggtgtccgtgtttcactttttccttttatatttgcttatggtgacaatatatatataacatatatattggcatc

SEQ ID NO: 14277 - RNA, 768 nt, synthetic construct
  source 1..768: mol_type = other RNA
aaaaaacaaaaaacaggaggaggaggaggaaaaaaaggaggaggaggaaaacgccataagcaaagcaatcctcctcctcctaaaaaacctcctcctcctcctagccgaaaaacaaaaaacaaaaaaaacaaaaaaaaaaccaaaaaaacaaaattaaaactggatctgggttgttcccacttggatctcccaaagggagtggtactctgttattacggtaactttgtacgccagttttatcctccccttaccccatgtaacttagaagtttttcataaagaccaatagttggtaatcatccagattacttaaggtcaagcacttctgtttccccggtcaatgttgatatgctccaacagggcaaaaacaactgcgatcgttatccgcaaagcgcctacgcaaagcttagtagcacctttgagattgtttggttggtcgttccgccatttcccctggtagacctggcagatgaggctagaagtaccccactggcgacagtgttctagcctgcgtggctgcctgcacaccctgtgggtgtgaagccaaataatggacaaggtgtgaagagccccgtgtgctcgctttgagtcctccggcccctgaatgcggctaaccttaaccctgcagctagagcatacaaaccagtgtgtatctagtcgtaatgagcaattgcgggatgggaccgactactttgggtgtccgtgtttcactttttttttacttataattgcttatggtgacaatatatatatagtatatattgacacc

SEQ ID NO: 14278 - RNA, 767 nt, synthetic construct
  source 1..767: mol_type = other RNA
aaaaaacaaaaaacaggaggaggaggaggaaaaaaaggaggaggaggaaaacgccataagcaaagcaatcctcctcctcctaaaaaacctcctcctcctcctagccgaaaaacaaaaaacaaaaaaaacaaaaaaaaaaccaaaaaaacaaaattaaaactggatccaggttgttcccacctggatctcctacgggagttgtactctgttatttcggtaaccttgtacgccagttttatctcccctcccccaattgtaacttagaagcaatacacaaggaccaataggcagtgattaaccagatcacttaaggtcaagcacttctgtttccccggtctgagttgatatgctctaacagggcaaaaacaagtcagatcgttatccgcaaagtgcctacgcaaagcctagtatcatctttgaaaatgtatggttggtcattccgctgaaccccacagtagacctggcagatgaggctagaaaccccccactggcgacagtgttctagcctgcgtggctgcctgcacacccttatgggtgtgaagccatatatttgacaaggtgtgaagagccccgtgtgctcactttgagtcctccggcccctgaatgtggctaaccctaaccctgcagctagtgcatacaagccagtatgttgctagtcgtaacgagcaattgcgggatgggaccaactactttgggtgtccgtgtttcactttttacctttatactgcttatggtgacaatatatatatagcatatatattgacacc

SEQ ID NO: 14279 - RNA, 765 nt, synthetic construct
  source 1..765: mol_type = other RNA
aaaaaacaaaaaacaggaggaggaggaggaaaaaaaggaggaggaggaaaacgccataagcaaagcaatcctcctcctcctaaaaaacctcctcctcctcctagccgaaaaacaaaaaacaaaaaaaacaaaaaaaaaaccaaaaaaacaaaattaaaactgggtccaggttgttcccacctggatctcctacatggagttgtactctgttattccggtaaccttgtacgccagttttatatcccctccccaaatgtaacttagaagttatacacacagaccaataggcggtgatcctccagatcactaacggtcaagcacttctgtctccccggtttgaattgatacgctccaacagggcgaaaacaatttgaatcgttacccgcaaagtgcctacgcaaagcctagtagcactttagaaaatttatggttggtcgctcagctataccccctagtagacctggcagatgaggctagaagtaccccactggcgacagtgttctagcctgcgtggctgcctgcacaccctcacgggtgtgaagccatatatttgacaaggtgtgaagagccccgtgtgctcactttgagtcctccggcccctgaatgtggctaaccttaaccctgcagctagtgcatgtaatccaacatgttgctagtcgtaatgagcaattgcgggatgggaccaactactttgggtgtccgtgtttcactttttaccttttatttgcttatggtgacaatatatataatatatatattggcatc

SEQ ID NO: 14280 - RNA, 764 nt, synthetic construct
  source 1..764: mol_type = other RNA
aaaaaacaaaaaacaggaggaggaggaggaaaaaaaggaggaggaggaaaacgccataagcaaagcaatcctcctcctcctaaaaaacctcctcctcctcctagccgaaaaacaaaaaacaaaaaaaacaaaaaaaaaaccaaaaaaacaaaaataaaactggcgtgcatagttcccatccagatcacccaagtggtgtagtgctctgttattccggtaactttgcacgccagttttattacccctttccccagtaacttagaagctttaatacactgaccaatagggtgcgacaaccagtcgtacaaggtcaagcacttctgtttccccggtcaatgttgatatgctcctccagggcaaaaacaatagcgatcgttatccgcaagatgcctacgcaaagcctagtagcatctttgaaaatacttggttggtcgctcatgtgcaaccccagcattagacctggcagatgaggctagaaattccccactggcgacagtgttctagcctgcgtggctgcctgcacaccctaacgggtgtgaagcctggtattggacaaggtgtgaagagccccgtgtgctcatcttgagtcctccggcccctgaatgcggctaaccttaaacctgcagccattgcttacaatccagtgagtttatggtcgtaatgagcaattgcgggatgggaccgactactttgggtgtccgtgtttctctttttacttaaatttgagcttatggtgacaatatatagcaatatatattggcatc

SEQ ID NO: 14281 - RNA, 762 nt, synthetic construct
  source 1..762: mol_type = other RNA
aaaaaacaaaaaacaggaggaggaggaggaaaaaaaggaggaggaggaaaacgccataagcaaagcaatcctcctcctcctaaaaaacctcctcctcctcctagccgaaaaacaaaaaacaaaaaaaacaaaaaaaaaaccaaaaaaacaaaagttgttcccacccctaccacccatgtggtgtagtgctcttgtattacggtacacttgcacgccagtttgcctccccaccccctttccatttacacccaaccttatgtaacttagaagcagtacactggaccaataggtggtaacaatccatgttaccaaaggtcaagcacttctgtctccccggcatgcgtggaataaacagtgcaaacggttgagaccacaaatgtcgttacccgcgcatgaactacgcagagcctagtatctccctgaaagtccattggttggtcgttcagctaaaccccatagtagacctggcagatgaggcaagacgcaccccactggcgacagtggtcttgcctgcgtggctgcctgcacacccttcggggtgtgaagccaattgacagacagggtgtgaagagccgagtgtgcttcatgtgaatcctccggcccctgaatgcggctaatctaaccccgcagctgtggcacacaagccagtgtgtatgcagtcgtaacgggcaactgcgggacggaaccgactactttgggtgtccgtgtttccttttattcttttatcaagtacttatggtgacaataataaatattgttacc

SEQ ID NO: 14282 - RNA, 743 nt, synthetic construct
  source 1..743: mol_type = other RNA
aaaaaacaaaaaacaggaggaggaggaggaaaaaaaggaggaggaggaaaacgccataagcaaagcaatcctcctcctcctaaaaaacctcctcctcctcctagccgaaaaacaaaaaacaaaaaaaacaaaaaaaaaaccaaaaaaacaaaatgggtgtagtgctctggtattttgtacctttgcacgcctgtttcccctttgtacccacccttaatttcctccctctgtaacgttagaagtttgtgaaattaaaagtacaataggaagcatcacatccagtggtgtttagtacaagcactcctgtttccccggagcgaggtataggttgtacccacgaccaaaagcctttaaccgttacccgccaatcaactacgtaacggctagtaccatcatgtttttaatctggtgttcgatcaggtggtatcccccactagtctggtcgatgaggctaggaattccccacgggtaaccgtgtcctagcctgcgtggcggccagcccagcttatgctgggacgcctttttaaagacatggtgtgaagacccgcatgtgcttgattgtgagtcctccggcccctgaatgcggctaaccctaaccccggagcccagcaacataatccaatgttgtttgggtcgtaatgagtaattctgggatgggaccgactactttgggtgtccgtgtttccttttattcttatattgtcttatggtcacagcatatatattacatatatactgtgatc

SEQ ID NO: 14283 - RNA, 735 nt, synthetic construct
  source 1..735: mol_type = other RNA
aaaaaacaaaaaacaggaggaggaggaggaaaaaaaggaggaggaggaaaacgccataagcaaagcaatcctcctcctcctaaaaaacctcctcctcctcctagccgaaaaacaaaaaacaaaaaaaacaaaaaaaaaaccaaaaaaacaaaagtactctggtattatgtacctttgtacgcctgttcttcccattgtacccttcctaaatttccaacccaagtgacgttagaagtttcacataaaagtacaataggaagcaccacatccagtggtgttttgtacaagcacttctgtttccccggagcgaggtataggctgtacccactgccaaaagcctttaaccgttatccgccaaccaactacgtaaaagctagtaacatcttgtttgtaacttggcgttcgatcaggtggattccccctccactagtttggtcgatgaggctaggagttccccacgggcgaccgtgtcctagcctgcgtggcggccaacccagcacttgctgggacgcccttttatagacatggtgtgaagactcgcatgtgcttggttgtgattcctccggcccctgaatgcggctaaccttaaccccggagccttgtgttgcaaaccagcaacattaaggtcgtaacgagcaattctgggatgggaccgactactttgggtgtccgtgtttccaatttttcttattattgtcttatggtcacagcatatttgataaatatactgtgatc

SEQ ID NO: 14284 - RNA, 725 nt, synthetic construct
  source 1..725: mol_type = other RNA
aaaaaacaaaaaacaggaggaggaggaggaaaaaaaggaggaggaggaaaacgccataagcaaagcaatcctcctcctcctaaaaaacctcctcctcctcctagccgaaaaacaaaaaacaaaaaaaacaaaaaaaaaaccaaaaaaacaaaagtagtatacttgtattccggtacatttatacgccagttttatgatcccctaccccaaatgtaacttagaaacatgtacacaatgatcaatagggtggtggctatccaagtcacctaagatcaagcacttctgtttccccggtgagtgtggatatgctttacccaaggcagaaactaatctcatcgttatccgcaaggtgcctacgggaagcctagtaatattctgaaggtattctggttggtcgctcagttgcattcacccgtgcaatagacctggcagatggggctaggcataccccactggtaacagtggcctagcccgcgtggctgcctgcacaccttcgggtgtgaagccataatattgacagggtgtgaagagcctactgtgctcaccttgagtcctccggcccctgaatgtggctaatcctaaccccgtatccattgcacacaagccagtgtgtttatggtcgtaatgggtaactacgggatggaaccaactactttgggtgtccgtgtttcttgtttttctttaatattgcttatggtgacattatatatcgatatagtgtcatc

SEQ ID NO: 14285 - RNA, 713 nt, synthetic construct
  source 1..713: mol_type = other RNA
aaaaaacaaaaaacaggaggaggaggaggaaaaaaaggaggaggaggaaaacgccataagcaaagcaatcctcctcctcctaaaaaacctcctcctcctcctagccgaaaaacaaaaaacaaaaaaaacaaaaaaaaaaccaaaaaaacaaaatcttgtattacggtacatttccataccagttttatacaccccaccccgaaactcatagaagtttgtacacaatgaccaataggcggtggccatccaggtcactaatggtcaagcacttctgtttccccggcacccttgtatacgcttcacccgaggcgaaaaacgaggtcgtcgttatccgcaaagtgcctacgaaaagcctagtaacactttgaaaacctatggttggtcgctcaactgttcacccaacagtagacctggcagatgaggctagacactccccaccagcgatggtggtctagcctgcgtggctgcctgcacaccctaccgggtgtgaagccagaaagtggacaaggtgtgaagagcctattgtgctcactttgagtcctccggcccctgaatgtggctaaccctaaccccgtagctgttgcatgtaatccaacatgtatgcagtcgtaatgggcaactatgggatgggaccaactactttgggtgtccgtgtttcctgttttactttttcattgcttatggtgacaattgtatctgatacacttgttacc

SEQ ID NO: 14286 - RNA, 702 nt, synthetic construct
  source 1..702: mol_type = other RNA
aaaaaacaaaaaacaggaggaggaggaggaaaaaaaggaggaggaggaaaacgccataagcaaagcaatcctcctcctcctaaaaaacctcctcctcctcctagccgaaaaacaaaaaacaaaaaaaacaaaaaaaaaaccaaaaaaacaaaagtctggggttgatcccccccccccggcactgggtgcaagccccagaaaccgacgcctatctaagtagacgcaatgactcggcgccgacccggcgaccggccaaaaggtggtggatgggtgatgccagggttggtaggtcgtaaatcccggtcatcttggtagccactataggtgggtcttaagggaaggttaagattcctcttgtgcctgtggcgagacagcgcacggtccacaggtgttggccctaccggtgtgaataagggcccgacgtcaggctcgtcgttaaaccgagaccgacacccacccgggcaaacgacgctcacgtacggtccacgtcgcccttcaatgtctctcttgaccaataggctttgccggcgagttgacaaggaccagtgagggccgggggcgagggggaaggaccccctcgccctgcccattccggtgggacgggaaatgcatggggccacccagctccgcggcggcctgcagccggggtagcccaagagccttcgggtgagggcgggtggcatttttctttcttaaccgatc

SEQ ID NO: 14287 - RNA, 691 nt, synthetic construct
  source 1..691: mol_type = other RNA
aaaaaacaaaaaacaggaggaggaggaggaaaaaaaggaggaggaggaaaacgccataagcaaagcaatcctcctcctcctaaaaaacctcctcctcctcctagccgaaaaacaaaaaacaaaaaaaacaaaaaaaaaaccaaaaaaacaaaatacgccagttttataaccccttcccttctgcaacttagaagtttgaacttaagaccaacaggtggtaatcaaccagattactaaaggtcaagcacttctgtttccccggtcaatattgatatgctccaccagggcaaaaacaattgcgatcgttatccgcaaagtgcctacgcaaagcttagtaacattttgaataatatatggttggtcgttccactattccccatagtagacctggcagatgaggctggaaactccccactggcgacagtgttccagcctgcgtggctgcctgcgcactctcacgagtgcgaagccatatatttgacaaggtgtgaagagccccgtgtgctcactttgagtcctccggcccctgaatgtggctaaccttaaccctgcagctagtgcatacaagccagtatgtagctagtcgtaatgagcaattgcgggatgggaccaactactttgggtgtccgtgtttcacttttatctttattatttgcttatggtgacagtatatagtgtatatattgttacc

SEQ ID NO: 14288 - RNA, 674 nt, synthetic construct
  source 1..674: mol_type = other RNA
aaaaaacaaaaaacaggaggaggaggaggaaaaaaaggaggaggaggaaaacgccataagcaaagcaatcctcctcctcctaaaaaacctcctcctcctcctagccgaaaaacaaaaaacaaaaaaaacaaaaaaaaaaccaaaaaaacaaaatcactgggtgcaagccccagaaaccgacgcctatcaaaatagacgtgatggccccgcgccgaactggcgaccggccaaaaggtggtggatgggtgatgacagggttggtaggtcgtaaatcccggtcatcctggtagccactataggtgggtcttaaagggaggctacggtccctctcgcgcttacggagagaaagcgcacggtccacaggtgttggccctaccggtgtaataagggcccggcgctaggcacgccgttaaaccgagaccgttatccccctgggcaaacgacgcccatgtacggcctacgtcgcccttcaatgtctctcttgaccaataggctttgccggcgagttgacaagggccagtgggggccgggcggcgggggaaggacctccgccgctgcccttcccgggggagcgggaaatgcatggggccacccagctccgcggcggcctacagccggggtagcccaagaaccttcgggtgagggcgggtggcattttctttcctataccgatc

SEQ ID NO: 14289 - RNA, 628 nt, synthetic construct
  source 1..628: mol_type = other RNA
aaaaaacaaaaaacaggaggaggaggaggaaaaaaaggaggaggaggaaaacgccataagcaaagcaatcctcctcctcctaaaaaacctcctcctcctcctagccgaaaaacaaaaaacaaaaaaaacaaaaaaaaaaccaaaaaaacaaaactacacccagtggtgttaagcacaagtacttctgtttccccggagcggagtatagacggtccccactgtcaaaagctcttaaccgttatccgccaaccaactacgtgacgactagtagcatcattttgacactttgacgttcgatcaggtaggttcaccccacctactagtttggtcgatgaggctgggagtccctcacaggtaactgtgtcccagcctgcgtggcggccaacccagcaattgctgggacgccaatttgttgacatggtgtgaagatcctaatgtgcttggttgtgagtcctccggcccctgaatgcggctaaccttaaccccggagccttgtggcacaagccagtgacattaaggtcgtaaggagcaattctgggatgggaccgactactttgggtgtccgtgtttcctatttttctttaaattgtcttatggtcacagcatatattaattatatactgtgatc

SEQ ID NO: 14290 - RNA, 598 nt, synthetic construct
  source 1..598: mol_type = other RNA
aaaaaacaaaaaacaggaggaggaggaggaaaaaaaggaggaggaggaaaacgccataagcaaagcaatcctcctcctcctaaaaaacctcctcctcctcctagccgaaaaacaaaaaacaaaaaaaacaaaaaaaaaaccaaaaaaacaaaaaccacaaacactccagtttgttacactccgctaggaatgctcctggagcaccccccctagcagggcgtgggggatttcccctgcccgtctgcagaagggtggagccaaccaccttagtatgtaggcggcgggactcatgacgctcgcgtgatgacaagcgccaagcttgacttggatggccctgatgggcgttcatgggttcggtggtggtggcgctttaggcagcctccacgcccaccacctcccagatagagcggcggcactgtagggaagaccggggaccggtcactaccaaggacgcagacctctttttgagtatcacgcctccggaagtagttgggcaagcccacctatatgtgttgggatggttggggttagccatccataccgtactgcctgatagggtccttgcgaggggatctgggagtctcgtagaccgtagcac

SEQ ID NO: 14291 - RNA, 492 nt, synthetic construct
  source 1..492: mol_type = other RNA
aaaaaacaaaaaacaggaggaggaggaggaaaaaaaggaggaggaggaaaacgccataagcaaagcaatcctcctcctcctaaaaaacctcctcctcctcctagccgaaaaacaaaaaacaaaaaaaacaaaaaaaaaaccaaaaaaacaaaagccagccccttacggggcgacactccgccatgaatcactcccctgcgaggaaccactgtcctcacgcagaaagcgtctagccatgacgttagtatgagtgtcgtacagcctccaggaccccccctcccgggagagccatagtggtctgcggaaccggtgagtacaccggaattgccgggaagactgggtcctttcttggatcaacccactctatgcccggagatttgggcgtgcccccgcgagactgctagccgagtagtgttgggtcgcgaaaggccttgtggtactgcctgatagggtgcttgcgagtgccccgggaggtctcgtagaccgtgcacc

SEQ ID NO: 14292 - RNA, 482 nt, synthetic construct
  source 1..482: mol_type = other RNA
aaaaaacaaaaaacaggaggaggaggaggaaaaaaaggaggaggaggaaaacgccataagcaaagcaatcctcctcctcctaaaaaacctcctcctcctcctagccgaaaaacaaaaaacaaaaaaaacaaaaaaaaaaccaaaaaaacaaaatgaactgttgttgtagcaatgcgcatattgctacttcggtacgcctaattggtaggcgcccggccgaccggccccgcaagggcctagtaggacgtgtgacaatgccatgagggatcatgacactggggtgagcggaggcagcaccgaagtcgggtgaactcgactcccagtgcgaccacctggcttggtcgttcatggagggcatgcccacgggaacgctgatcgtgcaaagggatgggtccctgcactggtgccatgcgcggcaccactccgtacagcctgatagggtggcggcgggcccccccagtgtgacgtccgtggagcgcaac

SEQ ID NO: 14293 - RNA, 466 nt, synthetic construct
  source 1..466: mol_type = other RNA
aaaaaacaaaaaacaggaggaggaggaggaaaaaaaggaggaggaggaaaacgccataagcaaagcaatcctcctcctcctaaaaaacctcctcctcctcctagccgaaaaacaaaaaacaaaaaaaacaaaaaaaaaaccaaaaaaacaaaaacttttaaagataaagtgagtgtagggtggctatctctcatctttttctttaactagctttgtgctagattttgtcttcggacaccaactcgaactaaacgaaatatttgtctttctatgaaaccatagaggacaagcgttgattatttccactcagtttggcaatcactccttggaacggggttgagcgaacggtgcagtagggttccgtccctatttcgtaagtcgcctagtagtagcgcgtgcggttccgcccgtacccgttggtgagctcaggttccgccctgtacctccctcgccggccgccaggaga

SEQ ID NO: 14294 - RNA, 441 nt, synthetic construct
  source 1..441: mol_type = other RNA
aaaaaacaaaaaacaggaggaggaggaggaaaaaaaggaggaggaggaaaacgccataagcaaagcaatcctcctcctcctaaaaaacctcctcctcctcctagccgaaaaacaaaaaacaaaaaaaacaaaaaaaaaaccaaaaaaacaaaaaagcaacttatctatctacagatagaaaagttgctttttagactttgtgtctacttttctcaactaaacgaaatttttgctatggccggcatctttgatgctagagtcgtagtgtaattgaaatttcatttgggttgcaacagtttggaagcaagtgctgtgtgttctagtctaagggtttcgtgttccgtcacgagattccattctacaaacgccttacgcgaggttctgtctcgtgtttgtgtggaagcaaagttttgtctttgtggaaaccagtaactgttccta

SEQ ID NO: 14295 - RNA, 430 nt, synthetic construct
  source 1..430: mol_type = other RNA
aaaaaacaaaaaacaggaggaggaggaggaaaaaaaggaggaggaggaaaacgccataagcaaagcaatcctcctcctcctaaaaaacctcctcctcctcctagccgaaaaacaaaaaacaaaaaaaacaaaaaaaaaaccaaaaaaacaaaaatttaagtgaatagcttggctatctcacttcccctcgttctcttgcagaactttgattttaacgaacttaaataaaagccctgttgtttagcgtattgttgcacttgtctggtgggattgtggcattaatttgcctgctcatctaggcagtggacatatgctcaacactgggtataattctaattgaatactatttttcagttagagcgtcgtgtctcttgtacgtctcggtcacaatacacggtttcgtccggtgcgtggcaattcggggcacatc

SEQ ID NO: 14296 - RNA, 418 nt, synthetic construct
  source 1..418: mol_type = other RNA
aaaaaacaaaaaacaggaggaggaggaggaaaaaaaggaggaggaggaaaacgccataagcaaagcaatcctcctcctcctaaaaaacctcctcctcctcctagccgaaaaacaaaaaacaaaaaaaacaaaaaaaaaaccaaaaaaacaaaaattaaaggtttataccttcccaggtaacaaaccaaccaactttcgatctcttgtagatctgttctctaaacgaactttaaaatctgtgtggctgtcactcggctgcatgcttagtgcactcacgcagtataattaataactaattactgtcgttgacaggacacgagtaactcgtctatcttctgcaggctgcttacggtttcgtccgtgttgcagccgatcatcagcacatctaggtttcgtccgggtgtgaccgaaaggtaag

SEQ ID NO: 14297 - RNA, 417 nt, synthetic construct
  source 1..417: mol_type = other RNA
aaaaaacaaaaaacaggaggaggaggaggaaaaaaaggaggaggaggaaaacgccataagcaaagcaatcctcctcctcctaaaaaacctcctcctcctcctagccgaaaaacaaaaaacaaaaaaaacaaaaaaaaaaccaaaaaaacaaaaatattaggtttttacctacccaggaaaagccaaccaacctcgatctcttgtagatctgttctctaaacgaactttaaaatctgtgtagctgtcgctcggctgcatgcctagtgcacctacgcagtataaacaataataaattttactgtcgttgacaagaaacgagtaactcgtccctcttctgcagactgcttacggtttcgtccgtgttgcagtcgatcatcagcatacctaggtttcgtccgggtgtgaccgaaaggtaag

SEQ ID NO: 14298 - RNA, 394 nt, synthetic construct
  source 1..394: mol_type = other RNA
aaaaaacaaaaaacaggaggaggaggaggaaaaaaaggaggaggaggaaaacgccataagcaaagcaatcctcctcctcctaaaaaacctcctcctcctcctagccgaaaaacaaaaaacaaaaaaaacaaaaaaaaaaccaaaaaaacaaaaactttgtgtctactcttctcaactaaacgaaatttttctagtgctgtcatttgttatggcagtcctagtgtaattgaaatttcgtttagtttgtaaactggttaggcaagtgttgtattttctgtgtctaagcactggtgattctgttcactagtgcatacactgatatttaagtggtgttccgtcactgcttattgtggaagcaacgttctgtcgttgtggaaaccaataactgctaacc

SEQ ID NO: 14299 - RNA, 358 nt, synthetic construct
  source 1..358: mol_type = other RNA
aaaaaacaaaaaacaggaggaggaggaggaaaaaaaggaggaggaggaaaacgccataagcaaagcaatcctcctcctcctaaaaaacctcctcctcctcctagccgaaaaacaaaaaacaaaaaaaacaaaaaaaaaaccaaaaaaacaaaagagtttgagcgattgacgttcgtaccgtctatcagcttacgatctcttgtcagatctcattaaatctaaactttttaaacaagattccctgttatccatgcttgtgagtgtggtttaatcataatcttgtattttactttccacacttttcatctctctgccagtgacgtgttggttgtcctcagcgtccctcccataggtcgca

SEQ ID NO: 14300 - RNA, 337 nt, synthetic construct
  source 1..337: mol_type = other RNA
aaaaaacaaaaaacaggaggaggaggaggaaaaaaaggaggaggaggaaaacgccataagcaaagcaatcctcctcctcctaaaaaacctcctcctcctcctagccgaaaaacaaaaaacaaaaaaaacaaaaaaaaaaccaaaaaaacaaaatcccgcttcactgatctcttgttagatctttttgtaatctaaactttataaaaacatccactccctgtaatctatgcttgtgggcgtagatttttcatagtggtgtttatattcatttctgctgttaacagctttcagccagggacgtgttgtatcctaggcagtggccctcccataggtcaca

SEQ ID NO: 14301 - RNA, 335 nt, synthetic construct
  source 1..335: mol_type = other RNA
aaaaaacaaaaaacaggaggaggaggaggaaaaaaaggaggaggaggaaaacgccataagcaaagcaatcctcctcctcctaaaaaacctcctcctcctcctagccgaaaaacaaaaaacaaaaaaaacaaaaaaaaaaccaaaaaaacaaaagtcttaggacgacgcatgtggtatcccagcccccgcctacattggcgggggcttttgaagcaccagacactggatctgatcaggaggagggtagctgctttacagcccctcttaaaaattgcccaaggtccggccacccaacctaggggactaggttttccttttatttttaaattgtcatt

SEQ ID NO: 14302 - RNA, 329 nt, synthetic construct
  source 1..329: mol_type = other RNA
aaaaaacaaaaaacaggaggaggaggaggaaaaaaaggaggaggaggaaaacgccataagcaaagcaatcctcctcctcctaaaaaacctcctcctcctcctagccgaaaaacaaaaaacaaaaaaaacaaaaaaaaaaccaaaaaaacaaaaagaacaacgtgattacttcgaccctctgcgcgggcagtaaatatagcgcctcctctggcagttctctggacaagaactgttcccagtgcgtgggaaacaatagcgcgcgcgtcttggatgattccgctaagaatctcccaactaacatcatttgcgggtcccccgcctgcagggtg

SEQ ID NO: 14303 - RNA, 291 nt, synthetic construct
  source 1..291: mol_type = other RNA
aaaaaacaaaaaacaggaggaggaggaggaaaaaaaggaggaggaggaaaacgccataagcaaagcaatcctcctcctcctaaaaaacctcctcctcctcctagccgaaaaacaaaaaacaaaaaaaacaaaaaaaaaaccaaaaaaacaaaactttgctcactcagcacaggatctgatcaggagatttgtctccggtgctttacaccggagcacaaatttaaaaattgcccaaggcctggcaaataacctaggggactaggttttcttttaatttacacgtctgtcaat

SEQ ID NO: 14304 - RNA, 285 nt, synthetic construct
  source 1..285: mol_type = other RNA
aaaaaacaaaaaacaggaggaggaggaggaaaaaaaggaggaggaggaaaacgccataagcaaagcaatcctcctcctcctaaaaaacctcctcctcctcctagccgaaaaacaaaaaacaaaaaaaacaaaaaaaaaaccaaaaaaacaaaaagattttcttgcacgtgcgtgcgtttgcttcggacagcattagcagcggttggtttgaaagagatattcttttgtttctaccagtcgtgaacgtgttgaggaaaagacagcttaggagaacaagagctgggg

SEQ ID NO: 14305 - RNA, 281 nt, synthetic construct
  source 1..281: mol_type = other RNA
aaaaaacaaaaaacaggaggaggaggaggaaaaaaaggaggaggaggaaaacgccataagcaaagcaatcctcctcctcctaaaaaacctcctcctcctcctagccgaaaaacaaaaaacaaaaaaaacaaaaaaaaaaccaaaaaaacaaaaagattttcttgcacgtgcgatagcttcggacagctttggcagcggcagatttgaaagagatattttttcactttcatcagtcgtgaacgtgttgagaaaaagacagcttaggagaacaagagctgggg

SEQ ID NO: 14306 - RNA, 273 nt, synthetic construct
  source 1..273: mol_type = other RNA
aaaaaacaaaaaacaggaggaggaggaggaaaaaaaggaggaggaggaaaacgccataagcaaagcaatcctcctcctcctaaaaaacctcctcctcctcctagccgaaaaacaaaaaacaaaaaaaacaaaaaaaaaaccaaaaaaacaaaacacgtgagtgctctcgtttcagacaacgtgagcggcgctttgttggtatttccttggtgggaaagttttgaagcgttaacgtgttgaggaaaagacagcttaggagaacaagagctgggg

SEQ ID NO: 14307 - RNA, 271 nt, synthetic construct
  source 1..271: mol_type = other RNA
aaaaaacaaaaaacaggaggaggaggaggaaaaaaaggaggaggaggaaaacgccataagcaaagcaatcctcctcctcctaaaaaacctcctcctcctcctagccgaaaaacaaaaaacaaaaaaaacaaaaaaaaaaccaaaaaaacaaaaagtatattctgcgtgctaatcgttcgacgttagtccgtggagtgagcttctaatagagttgttaacacgtttgaataatttctactgaaaggagtagaagaaaggagattcattccca

SEQ ID NO: 14308 - RNA, 260 nt, synthetic construct
  source 1..260: mol_type = other RNA
aaaaaacaaaaaacaggaggaggaggaggaaaaaaaggaggaggaggaaaacgccataagcaaagcaatcctcctcctcctaaaaaacctcctcctcctcctagccgaaaaacaaaaaacaaaaaaaacaaaaaaaaaaccaaaaaaacaaaaagttgttgatctgtgtgaatcagactgcgacagttcgagtttgaagcgaaagctagcaacagtatcaacaggttttattttggatttggaaacgagagtttctggtc

SEQ ID NO: 14309 - RNA, 247 nt, synthetic construct
  source 1..247: mol_type = other RNA
aaaaaacaaaaaacaggaggaggaggaggaaaaaaaggaggaggaggaaaacgccataagcaaagcaatcctcctcctcctaaaaaacctcctcctcctcctagccgaaaaacaaaaaacaaaaaaaacaaaaaaaaaaccaaaaaaacaaaaagttgttagtctacgtggaccgacaagaacagtttcgaatcggaagcttgcttaacgtagttctaacagttttttattagagagcagatctctg

SEQ ID NO: 14310 - RNA, 558 nt, synthetic construct
  source 1..558: mol_type = other RNA
atgggagtcaaagttctgtttgccctgatctgcatcgctgtggccgaggccaagcccaccgagaacaacgaagacttcaacatcgtggccgtggccagcaacttcgcgaccacggatctcgatgctgaccgcgggaagttgcccggcaagaagctgccgctggaggtgctcaaagagatggaagccaatgcccggaaagctggctgcaccaggggctgtctgatctgcctgtcccacatcaagtgcacgcccaagatgaagaagttcatcccaggacgctgccacacctacgaaggcgacaaagagtccgcacagggcggcataggcgaggcgatcgtcgacattcctgagattcctgggttcaaggacttggagcccatggagcagttcatcgcacaggtcgatctgtgtgtggactgcacaactggctgcctcaaagggcttgccaacgtgcagtgttctgacctgctcaagaagtggctgccgcaacgctgtgcgacctttgccagcaagatccagggccaggtggacaagatcaagggggccggtggtgactag

SEQ ID NO: 14311 - RNA, 720 nt, synthetic construct
  source 1..720: mol_type = other RNA
atggtgagcaagggcgaggagctgttcaccggggtggtgcccatcctggtcgagctggacggcgacgtaaacggccacaagttcagcgtgtccggcgagggcgagggcgatgccacctacggcaagctgaccctgaagttcatctgcaccaccggcaagctgcccgtgccctggcccaccctcgtgaccaccctgacctacggcgtgcagtgcttcagccgctaccccgaccacatgaagcagcacgacttcttcaagtccgccatgcccgaaggctacgtccaggagcgcaccatcttcttcaaggacgacggcaactacaagacccgcgccgaggtgaagttcgagggcgacaccctggtgaaccgcatcgagctgaagggcatcgacttcaaggaggacggcaacatcctggggcacaagctggagtacaactacaacagccacaacgtctatatcatggccgacaagcagaagaacggcatcaaggtgaacttcaagatccgccacaacatcgaggacggcagcgtgcagctcgccgaccactaccagcagaacacccccatcggcgacggccccgtgctgctgcccgacaaccactacctgagcacccagtccgccctgagcaaagaccccaacgagaagcgcgatcacatggtcctgctggagttcgtgaccgccgccgggatcactctcggcatggacgagctgtacaagtag

SEQ ID NO: 14312 - RNA, 936 nt, synthetic construct
  source 1..936: mol_type = other RNA
atggcttccaaggtgtacgaccccgagcaacgcaaacgcatgatcactgggcctcagtggtgggctcgctgcaagcaaatgaacgtgctggactccttcatcaactactatgattccgagaagcacgccgagaacgccgtgatttttctgcatggtaacgctgcctccagctacctgtggaggcacgtcgtgcctcacatcgagcccgtggctagatgcatcatccctgatctgatcggaatgggtaagtccggcaagagcgggaatggctcatatcgcctcctggatcactacaagtacctcaccgcttggttcgagctgctgaaccttccaaagaaaatcatctttgtgggccacgactggggggcttgtctggcctttcactactcctacgagcaccaagacaagatcaaggccatcgtccatgctgagagtgtcgtggacgtgatcgagtcctgggacgagtggcctgacatcgaggaggatatcgccctgatcaagagcgaagagggcgagaaaatggtgcttgagaataacttcttcgtcgagaccatgctcccaagcaagatcatgcggaaactggagcctgaggagttcgctgcctacctggagccattcaaggagaagggcgaggttagacggcctaccctctcctggcctcgcgagatccctctcgttaagggaggcaagcccgacgtcgtccagattgtccgcaactacaacgcctaccttcgggccagcgacgatctgcctaagatgttcatcgagtccgaccctgggttcttttccaacgctattgtcgagggagctaagaagttccctaacaccgagttcgtgaaggtgaagggcctccacttcagccaggaggacgctccagatgaaatgggtaagtacatcaagagcttcgtggagcgcgtgctgaagaacgagcagtaa

SEQ ID NO: 14313 - RNA, 1653 nt, synthetic construct
  source 1..1653: mol_type = other RNA
atggccgatgctaagaacattaagaagggccctgctcccttctaccctctggaggatggcaccgctggcgagcagctgcacaaggccatgaagaggtatgccctggtgcctggcaccattgccttcaccgatgcccacattgaggtggacatcacctatgccgagtacttcgagatgtctgtgcgcctggccgaggccatgaagaggtacggcctgaacaccaaccaccgcatcgtggtgtgctctgagaactctctgcagttcttcatgccagtgctgggcgccctgttcatcggagtggccgtggcccctgctaacgacatttacaacgagcgcgagctgctgaacagcatgggcatttctcagcctaccgtggtgttcgtgtctaagaagggcctgcagaagatcctgaacgtgcagaagaagctgcctatcatccagaagatcatcatcatggactctaagaccgactaccagggcttccagagcatgtacacattcgtgacatctcatctgcctcctggcttcaacgagtacgacttcgtgccagagtctttcgacagggacaaaaccattgccctgatcatgaacagctctgggtctaccggcctgcctaagggcgtggccctgcctcatcgcaccgcctgtgtgcgcttctctcacgcccgcgaccctattttcggcaaccagatcatccccgacaccgctattctgagcgtggtgccattccaccacggcttcggcatgttcaccaccctgggctacctgatttgcggctttcgggtggtgctgatgtaccgcttcgaggaggagctgttcctgcgcagcctgcaagactacaaaattcagtctgccctgctggtgccaaccctgttcagcttcttcgctaagagcaccctgatcgacaagtacgacctgtctaacctgcacgagattgcctctggcggcgccccactgtctaaggaggtgggcgaagccgtggccaagcgctttcatctgccaggcatccgccagggctacggcctgaccgagacaaccagcgccattctgattaccccagagggcgacgacaagcctggcgccgtgggcaaggtggtgccattcttcgaggccaaggtggtggacctggacaccggcaagaccctgggagtgaaccagcgcggcgagctgtgtgtgcgcggccctatgattatgtccggctacgtgaataaccctgaggccacaaacgccctgatcgacaaggacggctggctgcactctggcgacattgcctactgggacgaggacgagcacttcttcatcgtggaccgcctgaagtctctgatcaagtacaagggctaccaggtggccccagccgagctggagtctatcctgctgcagcaccctaacattttcgacgccggagtggccggcctgcccgacgacgatgccggcgagctgcctgccgccgtcgtcgtgctggaacacggcaagaccatgaccgagaaggagatcgtggactatgtggccagccaggtgacaaccgccaagaagctgcgcggcggagtggtgttcgtggacgaggtgcccaagggcctgaccggcaagctggacgcccgcaagatccgcgagatcctgatcaaggctaagaaaggcggcaagatcgccgtgtaa

SEQ ID NO: 14314 - RNA, 816 nt, synthetic construct
  source 1..816: mol_type = other RNA
atggacgccatgaaacggggactgtgctgcgtgctgctgctgtgtggcgccgtgttcgtgtcacctagccgggtgcagcctaccgagagcatcgtgcggttccctaacatcacaaacctgtgtccattcggcgaggtgttcaacgccaccagattcgccagcgtgtacgcttggaatagaaaaagaatctctaattgcgtggccgattacagcgtgctgtacaacagcgcctccttcagcaccttcaagtgctacggcgtgtcccccaccaagctgaacgacctgtgcttcacaaatgtctacgccgatagcttcgtgattagaggcgacgaggtgaggcagatcgctccaggccagaccggcaagatcgctgattacaactacaagctgcctgatgacttcacaggatgtgtgatcgcctggaacagcaacaacctcgacagcaaggtgggaggcaactacaattacctgtatagactgttcagaaagtccaacctgaagcccttcgagagagacatcagcaccgaaatctaccaggccggctccaccccttgcaacggagtggaaggcttcaactgctacttccccctgcagagctacggttttcagcctaccaacggcgtgggctaccagccctaccgcgtggttgtgctgagcttcgagctgctgcacgccccagctacagtgtgcggccctaagaaatctaccaacctggtgaagaacaagggctatatccccgaggcccctagagacggccaagcctacgtgcggaaggacggcgaatgggtcctgctcagcacattcctgggcagctga

SEQ ID NO: 14315 - RNA, 3345 nt, synthetic construct
  source 1..3345: mol_type = other RNA
atggccccaaagaagaagcggaaggtcggtatccacggagtcccagcagccaagcggaactacatcctgggcctggacatcggcatcaccagcgtgggctacggcatcatcgactacgagacacgggacgtgatcgatgccggcgtgcggctgttcaaagaggccaacgtggaaaacaacgagggcaggcggagcaagagaggcgccagaaggctgaagcggcggaggcggcatagaatccagagagtgaagaagctgctgttcgactacaacctgctgaccgaccacagcgagctgagcggcatcaacccctacgaggccagagtgaagggcctgagccagaagctgagcgaggaagagttctctgccgccctgctgcacctggccaagagaagaggcgtgcacaacgtgaacgaggtggaagaggacaccggcaacgagctgtccaccaaagagcagatcagccggaacagcaaggccctggaagagaaatacgtggccgaactgcagctggaacggctgaagaaagacggcgaagtgcggggcagcatcaacagattcaagaccagcgactacgtgaaagaagccaaacagctgctgaaggtgcagaaggcctaccaccagctggaccagagcttcatcgacacctacatcgacctgctggaaacccggcggacctactatgagggacctggcgagggcagccccttcggctggaaggacatcaaagaatggtacgagatgctgatgggccactgcacctacttccccgaggaactgcggagcgtgaagtacgcctacaacgccgacctgtacaacgccctgaacgacctgaacaatctcgtgatcaccagggacgagaacgagaagctggaatattacgagaagttccagatcatcgagaacgtgttcaagcagaagaagaagcccaccctgaagcagatcgccaaagaaatcctcgtgaacgaagaggatattaagggctacagagtgaccagcaccggcaagcccgagttcaccaacctgaaggtgtaccacgacatcaaggacattaccgcccggaaagagattattgagaacgccgagctgctggatcagattgccaagatcctgaccatctaccagagcagcgaggacatccaggaagaactgaccaatctgaactccgagctgacccaggaagagatcgagcagatctctaatctgaagggctataccggcacccacaacctgagcctgaaggccatcaacctgatcctggacgagctgtggcacaccaacgacaaccagatcgctatcttcaaccggctgaagctggtgcccaagaaggtggacctgtcccagcagaaagagatccccaccaccctggtggacgacttcatcctgagccccgtcgtgaagagaagcttcatccagagcatcaaagtgatcaacgccatcatcaagaagtacggcctgcccaacgacatcattatcgagctggcccgcgagaagaactccaaggacgcccagaaaatgatcaacgagatgcagaagcggaaccggcagaccaacgagcggatcgaggaaatcatccggaccaccggcaaagagaacgccaagtacctgatcgagaagatcaagctgcacgacatgcaggaaggcaagtgcctgtacagcctggaagccatccctctggaagatctgctgaacaaccccttcaactatgaggtggaccacatcatccccagaagcgtgtccttcgacaacagcttcaacaacaaggtgctcgtgaagcaggaagaaaacagcaagaagggcaaccggaccccattccagtacctgagcagcagcgacagcaagatcagctacgaaaccttcaagaagcacatcctgaatctggccaagggcaagggcagaatcagcaagaccaagaaagagtatctgctggaagaacgggacatcaacaggttctccgtgcagaaagacttcatcaaccggaacctggtggataccagatacgccaccagaggcctgatgaacctgctgcggagctacttcagagtgaacaacctggacgtgaaagtgaagtccatcaatggcggcttcaccagctttctgcggcggaagtggaagtttaagaaagagcggaacaaggggtacaagcaccacgccgaggacgccctgatcattgccaacgccgatttcatcttcaaagagtggaagaaactggacaaggccaaaaaagtgatggaaaaccagatgttcgaggaaaagcaggccgagagcatgcccgagatcgaaaccgagcaggagtacaaagagatcttcatcaccccccaccagatcaagcacattaaggacttcaaggactacaagtacagccaccgggtggacaagaagcctaatagagagctgattaacgacaccctgtactccacccggaaggacgacaagggcaacaccctgatcgtgaacaatctgaacggcctgtacgacaaggacaatgacaagctgaaaaagctgatcaacaagagccccgaaaagctgctgatgtaccaccacgacccccagacctaccagaaactgaagctgattatggaacagtacggcgacgagaagaatcccctgtacaagtactacgaggaaaccgggaactacctgaccaagtactccaaaaaggacaacggccccgtgatcaagaagattaagtattacggcaacaaactgaacgcccatctggacatcaccgacgactaccccaacagcagaaacaaggtcgtgaagctgtccctgaagccctacagattcgacgtgtacctggacaatggcgtgtacaagttcgtgaccgtgaagaatctggatgtgatcaaaaaagaaaactactacgaagtgaatagcaagtgctatgaggaagctaagaagctgaagaagatcagcaaccaggccgagtttatcgcctccttctacaacaacgatctgatcaagatcaacggcgagctgtatagagtgatcggcgtgaacaacgacctgctgaaccggatcgaagtgaacatgatcgacatcacctaccgcgagtacctggaaaacatgaacgacaagaggccccccaggatcattaagacaatcgcctccaagacccagagcattaagaagtacagcacagacattctgggcaacctgtatgaagtgaaatctaagaagcaccctcagatcatcaaaaagggcaaaaggccggcggccacgaaaaaggccggccaggcaaaaaagaaaaagggatcctacccatacgatgttccagattacgcttacccatacgatgttccagattacgcttacccatacgatgttccagattacgcttaa

SEQ ID NO: 14316 - protein, 185 aa, synthetic construct
MGVKVLFALICIAVAEAKPTENNEDFNIVAVASNFATTDLDADRGKLPGKKLPLEVLKEMEANARKAGCTRGCLICLSHIKCTPKMKKFIPGRCHTYEGDKESAQGGIGEAIVDIPEIPGFKDLEPMEQFIAQVDLCVDCTTGCLKGLANVQCSDLLKKWLPQRCATFASKIQGQVDKIKGAGGD

SEQ ID NO: 14317 - protein, 239 aa, synthetic construct
MVSKGEELFTGVVPILVELDGDVNGHKFSVSGEGEGDATYGKLTLKFICTTGKLPVPWPTLVTTLTYGVQCFSRYPDHMKQHDFFKSAMPEGYVQERTIFFKDDGNYKTRAEVKFEGDTLVNRIELKGIDFKEDGNILGHKLEYNYNSHNVYIMADKQKNGIKVNFKIRHNIEDGSVQLADHYQQNTPIGDGPVLLPDNHYLSTQSALSKDPNEKRDHMVLLEFVTAAGITLGMDELYK

SEQ ID NO: 14318 - protein, 311 aa, synthetic construct
MASKVYDPEQRKRMITGPQWWARCKQMNVLDSFINYYDSEKHAENAVIFLHGNAASSYLWRHVVPHIEPVARCIIPDLIGMGKSGKSGNGSYRLLDHYKYLTAWFELLNLPKKIIFVGHDWGACLAFHYSYEHQDKIKAIVHAESVVDVIESWDEWPDIEEDIALIKSEEGEKMVLENNFFVETMLPSKIMRKLEPEEFAAYLEPFKEKGEVRRPTLSWPREIPLVKGGKPDVVQIVRNYNAYLRASDDLPKMFIESDPGFFSNAIVEGAKKFPNTEFVKVKGLHFSQEDAPDEMGKYIKSFVERVLKNEQ

SEQ ID NO: 14319 - protein, 550 aa, synthetic construct
MADAKNIKKGPAPFYPLEDGTAGEQLHKAMKRYALVPGTIAFTDAHIEVDITYAEYFEMSVRLAEAMKRYGLNTNHRIVVCSENSLQFFMPVLGALFIGVAVAPANDIYNERELLNSMGISQPTVVFVSKKGLQKILNVQKKLPIIQKIIIMDSKTDYQGFQSMYTFVTSHLPPGFNEYDFVPESFDRDKTIALIMNSSGSTGLPKGVALPHRTACVRFSHARDPIFGNQIIPDTAILSVVPFHHGFGMFTTLGYLICGFRVVLMYRFEEELFLRSLQDYKIQSALLVPTLFSFFAKSTLIDKYDLSNLHEIASGGAPLSKEVGEAVAKRFHLPGIRQGYGLTETTSAILITPEGDDKPGAVGKVVPFFEAKVVDLDTGKTLGVNQRGELCVRGPMIMSGYVNNPEATNALIDKDGWLHSGDIAYWDEDEHFFIVDRLKSLIKYKGYQVAPAELESILLQHPNIFDAGVAGLPDDDAGELPAAVVVLEHGKTMTEKEIVDYVASQVTTAKKLRGGVVFVDEVPKGLTGKLDARKIREILIKAKKGGKIAV

SEQ ID NO: 14320 - protein, 271 aa, synthetic construct
MDAMKRGLCCVLLLCGAVFVSPSRVQPTESIVRFPNITNLCPFGEVFNATRFASVYAWNRKRISNCVADYSVLYNSASFSTFKCYGVSPTKLNDLCFTNVYADSFVIRGDEVRQIAPGQTGKIADYNYKLPDDFTGCVIAWNSNNLDSKVGGNYNYLYRLFRKSNLKPFERDISTEIYQAGSTPCNGVEGFNCYFPLQSYGFQPTNGVGYQPYRVVVLSFELLHAPATVCGPKKSTNLVKNKGYIPEAPRDGQAYVRKDGEWVLLSTFLGS

SEQ ID NO: 14321 - protein, 1114 aa, synthetic construct
MAPKKKRKVGIHGVPAAKRNYILGLDIGITSVGYGIIDYETRDVIDAGVRLFKEANVENNEGRRSKRGARRLKRRRRHRIQRVKKLLFDYNLLTDHSELSGINPYEARVKGLSQKLSEEEFSAALLHLAKRRGVHNVNEVEEDTGNELSTKEQISRNSKALEEKYVAELQLERLKKDGEVRGSINRFKTSDYVKEAKQLLKVQKAYHQLDQSFIDTYIDLLETRRTYYEGPGEGSPFGWKDIKEWYEMLMGHCTYFPEELRSVKYAYNADLYNALNDLNNLVITRDENEKLEYYEKFQIIENVFKQKKKPTLKQIAKEILVNEEDIKGYRVTSTGKPEFTNLKVYHDIKDITARKEIIENAELLDQIAKILTIYQSSEDIQEELTNLNSELTQEEIEQISNLKGYTGTHNLSLKAINLILDELWHTNDNQIAIFNRLKLVPKKVDLSQQKEIPTTLVDDFILSPVVKRSFIQSIKVINAIIKKYGLPNDIIIELAREKNSKDAQKMINEMQKRNRQTNERIEEIIRTTGKENAKYLIEKIKLHDMQEGKCLYSLEAIPLEDLLNNPFNYEVDHIIPRSVSFDNSFNNKVLVKQEENSKKGNRTPFQYLSSSDSKISYETFKKHILNLAKGKGRISKTKKEYLLEERDINRFSVQKDFINRNLVDTRYATRGLMNLLRSYFRVNNLDVKVKSINGGFTSFLRRKWKFKKERNKGYKHHAEDALIIANADFIFKEWKKLDKAKKVMENQMFEEKQAESMPEIETEQEYKEIFITPHQIKHIKDFKDYKYSHRVDKKPNRELINDTLYSTRKDDKGNTLIVNNLNGLYDKDNDKLKKLINKSPEKLLMYHHDPQTYQKLKLIMEQYGDEKNPLYKYYEETGNYLTKYSKKDNGPVIKKIKYYGNKLNAHLDITDDYPNSRNKVVKLSLKPYRFDVYLDNGVYKFVTVKNLDVIKKENYYEVNSKCYEEAKKLKKISNQAEFIASFYNNDLIKINGELYRVIGVNNDLLNRIEVNMIDITYREYLENMNDKRPPRIIKTIASKTQSIKKYSTDILGNLYEVKSKKHPQIIKKGKRPAATKKAGQAKKKKGSYPYDVPDYAYPYDVPDYAYPYDVPDYA

SEQ ID NO: 14322-14343 - skipped (22 entries)

SEQ ID NO: 14344 - RNA, 426 nt, synthetic construct
  source 1..426: mol_type = other RNA
ctctctaaatagcaatatttacctttggagggaaaagttatcaggcatgcacctggtagctagtctttaaaccaatagattgcatcggtttaaaaggcaagaccgtcaaattgcgggaaaggggtcaacagccgttcagtaccaagtctcaggggaaactttgagatggccttgcaaagggtatggtaataagctgacggacatggtcctaaccacgcagccaagtcctaagtcaacagatcttctgttgatatggatgcagttcacagactaaatgtcggtcggggaagatgtattcttctcataagatatagtcggacctctccttaatgggagctagcggatgaagtgatgcaacactggagccgctgggaactaatttgtatgcgaaagtatattgattagttttggagtactcgtaaggta

SEQ ID NO: 14345 - RNA, 787 nt, synthetic construct
  source 1..787: mol_type = other RNA
tgcatgtgatgcaggtcgtggtgcgaatcgttcctaagtgaaaagcttaggcatcttagacaagggaaggccccattaagatagaactaatgattcgagagacagaatgatagagtaacgtcttgaaatgtttcccctaagtctccgacatgcattgaaaggtaggatgtttaaatgtgtgaagctcggtgaagacggctgacagataccgtagtgaaaaatgtgttttaaccgaaagtccttttagtaagaggatgtatcccataggccgggggtccgtaaagtatctatggtgagaatgttatatgaaataactgacgaactttcgaattaacgagtctataaccatacaatcagaaatgatagtaaaccatattttgtgttgtgtgtgaggttaagtaaattcgcggctatgaacaaccttacagtattataggtactgtctagcacgcaggctcatagaaggcacctaagggtaccatatagtggatagaatcattggaacgatgaaagctcaggacgcagagaacctacattctgtgaagcggtggtaaggaaaaggaggaatcctataacttatctttatttgagtgatagcgatgtcatagtagcgtggaatttatggaaacataaaggagcgaagggcattagtcaatattgtgaggaaaaagcaatattgatggcaagccgtatgaagggaaactttcatgtacggtttagtgtgggggaaaaagcagagattatatcaaagttttacctatcacaataaggagagaatatttttaat

SEQ ID NO: 14346 - RNA, 989 nt, synthetic construct
  source 1..989: mol_type = other RNA
caaaggcttacctatcactagcgcgacacgttcctaagtgaaaagcttaggcactgtcgaactcaacagttcagcagtgaactgtcattctaagaagtcaaatgaaggagtaacgtctggaagggcttcccttaatcctccgacatgcaggaaagtaggcaagtactgaactgtgtgaagctcggtgaagtcggttgaaggttaccgtaaattagtatctctaatacgaaagctatccagcggtggatggtgtaactgatagaccggaggtctataaaacactcaaggttaggatgcgcgatgaactagaggcgatcgctagtaagcgcagacgaatccctgatggtacgggtctatatcgggagggaatcgaaaggttctctgacacaaataagtgtcgctactgtgggtgagtaaaactctcctttatgaaagcccatatatcgttacaggcgttattaaggtagcaggctcataggggaaacctaaaagtgtatgtacagataagaatgacggaacgtggtaagctgccgacatggagggcttgttctctttgaagtgttgccaaggaaagtcacaatgagattagttgtcgatataacttggtttaacggcagtgaaagtggtggcacagtaccgatgaaacgtgtaatgaacgtggagggatagccactagtcgattgaagattgaaggttactattggttaacatggtttcgagtaagactaagagatgtaatgctccaaagtaataaggaggttacagcccatgttaaagaaaaccaagctaagacataacgaatattatgatacacaaaaaaagtgtatgacaatttatactcgaacagtcttaacggtaacaatttctttcaattggaaacgatggaacgccgtatgcccggaaacgggcgcgtacggtgtggagtgggggaaaagctggagataatctcaaaggcttacctatcactatcgcgacacgttcctaagtga

SEQ ID NO: 14347 - RNA, 867 nt, synthetic construct
  source 1..867: mol_type = other RNA
ttataacaaagtagttatttgtgcgacacgtttctttataagtgtgcaaacacgaagtaggagggttatcaatttgatgacaacaacggattgactgcaagtaggaatgaaagccgtcaggttgagctgaaactacttatctgatactcctatatgcaaggcgtgatagtagtcacaaattgtatgaagctaggtgaagtcggctgaacaaaacctaagtgagaaatcatatggtaatggataggtcgggatgctacaaaacatctatggtgagaatgtcctaacggactggcgaatgtacaggtttaaaggattaattcattagaaatgtgtatattgtcaacgacgacgctatctaccgaaaagtaagagtaaataatatgaaattcggaagatctaacgatgaggatgtaaagataacaggcttacagcaagcacctaaagatatatgtatagctaagtcattcagaacgtggtaagcaagagactgtcacaaatgcctactaacagacaaggtgcatataaggttctaacgaaccaaaattgctttattcttgtgaaggtggggacacagtaccgacgaagcatgtaacaaatgtggagggatagtccctagtcttgttcgttgaaaactaaatcaactggatataactcacaggatcgagtaagatgatgtgacttttcgtaagaaaagggaatgaatacgttggtgagtacaacatggtttgtaatctagttgttttagtataaaaggataagatggggcgctgtatgcgatgaaagtcgcacgtacagtgtcaagcgggggaaaagatggagataactttaaagtcttacctatcgcaacggataaaaagaatccctgct

SEQ ID NO: 14348 - RNA, 1046 nt, synthetic construct
  source 1..1046: mol_type = other RNA
gaatatactatagccatacaataaaagtgcgaaacgttatcctataagtaagaaagttttaaaattttcttacgaaaaggatagaacttaaaagttctaactgttctactaaagtaataagtgaaaatcttatttaaagcaaacaaccaagtagctttaagtctaagtcccctacacaagttttatactactatgcaaaacttgtgaagctaggtaaggtcgtaatccgtgaaagtcggatgcggggctccttaaaagattactatggtaaacataagctaatccattaagatgcgatttatatgtattttatactgttaaatatttttgtgcttgtggcttggtataaaacagttaagatgaagtacttaactggttttggaataattggttgttaaactaaaacattataaatcgttagtggatacctaaggtaatcaaaaatagggataggtagaatggaacgtttgatgctgtatatgaagaggtttagtagaacctaggacacatatacgggctcagcaggttcatagtagctatgatactcagccggaagtcaattaattttgaaatacttctatggtaacataggagaaggataaaactgagtgagccaaggaacctagtcggtaatagaaaagtggaagttaaaacaaatataagattttagaattaatttaattaatgaacggaattaatttaatgatatttaaagttagacggttataaattaaacatttcaaaattaaaccatatccaaattcataaatatagctagatcatatcactagtttaaaaataaataaatcatttcaaattactattaagtaaggtattaataccttacttaatagtaatctcattacataagagaattactagattagcagacagattcataaaaactatatcaactaggacaatagaaaatatatttatacacttcctattatcgagcgaacgccttatgcgatgaaagtcgcacgtagggtgtagaccaagcgaaatcctatgcatttaggatagtgaggtatagcaaaggagaa

SEQ ID NO: 14349 - RNA, 626 nt, synthetic construct
  source 1..626: mol_type = other RNA
actctaggtagacgagagtgcgactagtaaagtgcttaataacaatgtggtgaaagcccaccagataacccattatctgagctcagacggtatgcattagaagtaattcttttgtgtaaagcccgtttaatttggtaaacagaccaaccaacctatatataaggatggtgagctatattactatggataaaatttttatgaattcacgttcgaagcgtattagagtgagttttatttagaaggaaaaaagtaaataaaattctaattaattgtataaacaatttttcgtttgtttattaatgggtcttatattaatgtacgtatagtgaaatcctaaggtagtaaataaggtgttattaagtaaactaggtaagcccaataatatcttcatatgatagtatgaagaagttcaagtgtaaatttgaatatatattagtgggtaaaggatattttaaaaagcgaatgtctcatattaatagtgagaataggtttatgactaattcgaaagaatgctgacttaaaattaatattaatatttcgatattaatatttgagccgtatgcgatgaaagtcgcacgtacggttcttagagggggaaagtccaagagggcctacctatctcaaca

SEQ ID NO: 14350 - RNA, 639 nt, synthetic construct
  source 1..639: mol_type = other RNA
ctctagatagacgagagtgcgactagataagtacttaatagcaatgtggtgaaagtccacctgataacccatagtctgagctcagacggtatgcattagaagtaattcttttgtgtaaagcccgtttaatctggtctaaaggaccttccaccctaaatatatagggggagagctataatactaaggataaaatttttttgaattcatgtttaaagcgtattagaggaaatttatttctatgaaaaagaagaaataaatttttaattaactgtataaacaagttttcgtttgtttattagtgggtcttatgttaatgtacgtatagtggaatcctaaggtattaattaaggtgttattaagtaaactaggtaagcccaatagtgtcttcatattataatatgaagaagttcaattgtgaaattgaatatgcattagtgggtaaaggatattttaaaaagcgaatgtctcatattaatagtgagaataggtctatgactaattcgaaagaatgctgacttaaaattggtattaatatatgcgtttcgatgtatatattaatatttgagccgtatgcgatgaaagtcgcacgtacggttcttagagggggaaatcttagtaataagacgacctatctcgaca

SEQ ID NO: 14351 - RNA, 573 nt, synthetic construct
  source 1..573: mol_type = other RNA
gggtagcaataaggatgtgcgacttgttaagttttaacaaaaattgtataacgtttattaatgattatacattgtatttcatcttacaatagcctaattagatatgcatttagggtaacttttttgtataaagctctaattataagtgtaaatacacttttaggcttcttctatggttagagaaatcgaaccaatgtaattaaaactttgatgtattaggcatttaacgtgtccttggttaaatgaagatgaacataagtatacaaagtaaaattggaacctaaggaagaattgtttttgttaagaaacaaggtaatacctataactggctaatataaatttgcaaggtttattgtaaaataaactataggttagaggtaaaaggataatgtaaaaagcgaatgcaattctgtaatggaattgatagggtatatacctaacttgaaagagtgctgacttacatatagatgttatttacgtttcgacgtaaataatgtttgagccgtatgctatgaaagtagcacgtacggttctaagagggggaaagtccgagaggacctacctatctcaact

SEQ ID NO: 14352 - RNA, 659 nt, synthetic construct
  source 1..659: mol_type = other RNA
actctaggtagacgagagtgcgactagtaaagtgtttaataataatgtggtgaaaacccaccagataacccattatctgagctcatacggtgtgcattaaaagtaatttttttgtataaagcccgtttaatcaggtaaataatccttccatcctaattatatctatagatataaaaggatggtgagctatattactatggataagatttttttgaattcacgtttgaagcgtattagagtaagttttatttaaaaggaaaaaaaaaaattaaataaaattaaattaattgtataaataagttttcgtttatttattaatgggtcttatattaatgtacgtatagtgaaatcctaatgtagtaattaaggtgttattaaataaactaggtaagcccaataatgtcttcataatatgaagaagttcaagtgtaaatttgaatatacattagtgggtaaaggatattttaaaaagcgaatgtctcatattaatagtgagaataggtctatgactaattcgaaagaatgctgacttaaaattaatattaatattaatatatatatattaatatttgagccgtatgcgatgaaaatcgcacgtacggttcttagagggggaaagctcgagagggcctacctatctccacagaccctatgcagct

SEQ ID NO: 14353 - RNA, 261 nt, synthetic construct
  source 1..261: mol_type = other RNA
ctttgagatggccttgcaaagggtatggtaataagctgacggacatggtcctaaccacgcagccaagtcctaagtcaacagatcttctgttgatatggatgcagttcacagactaaatgtcggtcggggaagatgtattcttctcataagatatagtcggacctctccttaatgggagctagcggatgaagtgatgcaacactggagccgctgggaactaatttgtatgcgaaagtatattgattagttttggagtactcg

SEQ ID NO: 14354 - RNA, 97 nt, synthetic construct
  source 1..97: mol_type = other RNA
gcaatattgatggcaagccgtatgaagggaaactttcatgtacggtttagtgtgggggaaaaagcagagattatatcaaagttttacctatcacaat

SEQ ID NO: 14355 - RNA, 98 nt, synthetic construct
  source 1..98: mol_type = other RNA
attggaaacgatggaacgccgtatgcccggaaacgggcgcgtacggtgtggagtgggggaaaagctggagataatctcaaaggcttacctatcactat

SEQ ID NO: 14356 - RNA, 95 nt, synthetic construct
  source 1..95: mol_type = other RNA
ggataagatggggcgctgtatgcgatgaaagtcgcacgtacagtgtcaagcgggggaaaagatggagataactttaaagtcttacctatcgcaac

SEQ ID NO: 14357 - RNA, 88 nt, synthetic construct
  source 1..88: mol_type = other RNA
ctattatcgagcgaacgccttatgcgatgaaagtcgcacgtagggtgtagaccaagcgaaatcctatgcatttaggatagtgaggtat

SEQ ID NO: 14358 - RNA, 85 nt, synthetic construct
  source 1..85: mol_type = other RNA
atattaatatttgagccgtatgcgatgaaagtcgcacgtacggttcttagagggggaaagtccaagagggcctacctatctcaac

SEQ ID NO: 14359 - RNA, 93 nt, synthetic construct
  source 1..93: mol_type = other RNA
atgtatatattaatatttgagccgtatgcgatgaaagtcgcacgtacggttcttagagggggaaatcttagtaataagacgacctatctcgac

SEQ ID NO: 14360 - RNA, 88 nt, synthetic construct
  source 1..88: mol_type = other RNA
acgtaaataatgtttgagccgtatgctatgaaagtagcacgtacggttctaagagggggaaagtccgagaggacctacctatctcaac

SEQ ID NO: 14361 - RNA, 85 nt, synthetic construct
  source 1..85: mol_type = other RNA
atattaatatttgagccgtatgcgatgaaaatcgcacgtacggttcttagagggggaaagctcgagagggcctacctatctccac

SEQ ID NO: 14362 - RNA, 408 nt, synthetic construct
  source 1..408: mol_type = other RNA
gaataattggttgttaaactaaaacattataaatcgttagtggatacctaaggtaatcaaaaatagggataggtagaatggaacgtttgatgctgtatatgaagaggtttagtagaacctaggacacatatacgggctcagcaggttcatagtagctatgatactcagccggaagtcaattaattttgaaatacttctatggtaacataggagaaggataaaactgagtgagccaaggaacctagtcggtaatagaagctagatcatattactattaagtaaggtattaataccttacttaatagtaacaatagaaaatcctattatcgagcgaacgccttatgcgatgaaagtcgcacgtagggtgtagaccaagcgaaatcctatgcatttaggatagtgaggtat

SEQ ID NO: 14363 - RNA, 217 nt, synthetic construct
  source 1..217: mol_type = other RNA
tacttctatggtaacataggagaaggataaaactgagtgagccaaggaacctagtcggtaatagaagctagatcatattactattaagtaaggtattaataccttacttaatagtaacaatagaaaatcctattatcgagcgaacgccttatgcgatgaaagtcgcacgtagggtgtagaccaagcgaaatcctatgcatttaggatagtgaggtat

SEQ ID NO: 14364 - RNA, 148 nt, synthetic construct
  source 1..148: mol_type = other RNA
aaatagcaatatttacctttggagggaaaagttatcaggcatgcacctggtagctagtctttaaaccaatagattgcatcggtttaaaaggcaagaccgtcaaattgcgggaaaggggtcaacagccgttcagtaccaagtctcaggg

SEQ ID NO: 14365 - RNA, 641 nt, synthetic construct
  source 1..641: mol_type = other RNA
gtgcgaatcgttcctaagtgaaaagcttaggcatcttagacaagggaaggccccattaagatagaactaatgattcgagagacagaatgatagagtaacgtcttgaaatgtttcccctaagtctccgacatgcattgaaaggtaggatgtttaaatgtgtgaagctcggtgaagacggctgacagataccgtagtgaaaaatgtgttttaaccgaaagtccttttagtaagaggatgtatcccataggccgggggtccgtaaagtatctatggtgagaatgttatatgaaataactgacgaactttcgaattaacgagtctataaccatacaatcagaaatgatagtaaaccatattttgtgttgtgtgtgaggttaagtaaattcgcggctatgaacaaccttacagtattataggtactgtctagcacgcaggctcatagaaggcacctaagggtaccatatagtggatagaatcattggaacgatgaaagctcaggacgcagagaacctacattctgtgaagcggtggtaaggaaaaggaggaatcctataacttatctttatttgagtgatagcgatgtcatagtagcgtggaatttatggaaacataaaggagcgaagggcattagtcaatattgt

SEQ ID NO: 14366 - RNA, 666 nt, synthetic construct
  source 1..666: mol_type = other RNA
gcgcgacacgttcctaagtgaaaagcttaggcactgtcgaactcaacagttcagcagtgaactgtcattctaagaagtcaaatgaaggagtaacgtctggaagggcttcccttaatcctccgacatgcaggaaagtaggcaagtactgaactgtgtgaagctcggtgaagtcggttgaaggttaccgtaaattagtatctctaatacgaaagctatccagcggtggatggtgtaactgatagaccggaggtctataaaacactcaaggttaggatgcgcgatgaactagaggcgatcgctagtaagcgcagacgaatccctgatggtacgggtctatatcgggagggaatcgaaaggttctctgacacaaataagtgtcgctactgtgggtgagtaaaactctcctttatgaaagcccatatatcgttacaggcgttattaaggtagcaggctcataggggaaacctaaaagtgtatgtacagataagaatgacggaacgtggtaagctgccgacatggagggcttgttctctttgaagtgttgccaaggaaagtcacaatgagattagttgtcgatataacttggtttaacggcagtgaaagtggtggcacagtaccgatgaaacgtgtaatgaacgtggagggatagccactagtcgattgaag

SEQ ID NO: 14367 - RNA, 604 nt, synthetic construct
  source 1..604: mol_type = other RNA
gtgcgacacgtttctttataagtgtgcaaacacgaagtaggagggttatcaatttgatgacaacaacggattgactgcaagtaggaatgaaagccgtcaggttgagctgaaactacttatctgatactcctatatgcaaggcgtgatagtagtcacaaattgtatgaagctaggtgaagtcggctgaacaaaacctaagtgagaaatcatatggtaatggataggtcgggatgctacaaaacatctatggtgagaatgtcctaacggactggcgaatgtacaggtttaaaggattaattcattagaaatgtgtatattgtcaacgacgacgctatctaccgaaaagtaagagtaaataatatgaaattcggaagatctaacgatgaggatgtaaagataacaggcttacagcaagcacctaaagatatatgtatagctaagtcattcagaacgtggtaagcaagagactgtcacaaatgcctactaacagacaaggtgcatataaggttctaacgaaccaaaattgctttattcttgtgaaggtggggacacagtaccgacgaagcatgtaacaaatgtggagggatagtccctagtcttgttc

SEQ ID NO: 14368 - RNA, 618 nt, synthetic construct
  source 1..618: mol_type = other RNA
caataaaagtgcgaaacgttatcctataagtaagaaagttttaaaattttcttacgaaaaggatagaacttaaaagttctaactgttctactaaagtaataagtgaaaatcttatttaaagcaaacaaccaagtagctttaagtctaagtcccctacacaagttttatactactatgcaaaacttgtgaagctaggtaaggtcgtaatccgtgaaagtcggatgcggggctccttaaaagattactatggtaaacataagctaatccattaagatgcgatttatatgtattttatactgttaaatattttaatgctttatggttggtataaaacagttaagatgaagtacttaactggttttggaataattggttgttaaactaaaacattataaatcgttagtggatacctaaggtaatcaaaaatagggataggtagaatggaacgtttgatgctgtatatgaagaggtttagtagaacctaggacacatatacgggctcagcaggttcatagtagctatgatactcagccggaagtcaattaattttgaaatacttctatggtaacataggagaaggataaaactgagtgagccaaggaacctagtcggtaatag

SEQ ID NO: 14369 - RNA, 618 nt, synthetic construct
  source 1..618: mol_type = other RNA
caataaaagtgcgaaacgttatcctataagtaagaaagttttaaaattttcttacgaaaaggatagaacttaaaagttctaactgttctactaaagtaataagtgaaaatcttatttaaagcaaacaaccaagtagctttaagtctaagtcccctacacaagttttatactactatgcaaaacttgtgaagctaggtaaggtcgtaatccgtgaaagtcggatgcggggctccttaaaagattactatggtaaacataagctaatccattaagatgcgatttatatgtattttatactgttaaatatttttgtgcttagggcttggtataaaacagttaagatgaagtacttaactggttttggaataattggttgttaaactaaaacattataaatcgttagtggatacctaaggtaatcaaaaatagggataggtagaatggaacgtttgatgctgtatatgaagaggtttagtagaacctaggacacatatacgggctcagcaggttcatagtagctatgatactcagccggaagtcaattaattttgaaatacttctatggtaacataggagaaggataaaactgagtgagccaaggaacctagtcggtaatag

SEQ ID NO: 14370 - RNA, 618 nt, synthetic construct
  source 1..618: mol_type = other RNA
caataaaagtgcgaaacgttatcctataagtaagaaagttttaaaattttcttacgaaaaggatagaacttaaaagttctaactgttctactaaagtaataagtgaaaatcttatttaaagcaaacaaccaagtagctttaagtctaagtcccctacacaagttttatactactatgcaaaacttgtgaagctaggtaaggtcgtaatccgtgaaagtcggatgcggggctccttaaaagattactatggtaaacataagctaatccattaagatgcgatttatatgtattttatactgttaaatatttttgctcttcaacgttggtataaaacagttaagatgaagtacttaactggttttggaataattggttgttaaactaaaacattataaatcgttagtggatacctaaggtaatcaaaaatagggataggtagaatggaacgtttgatgctgtatatgaagaggtttagtagaacctaggacacatatacgggctcagcaggttcatagtagctatgatactcagccggaagtcaattaattttgaaatacttctatggtaacataggagaaggataaaactgagtgagccaaggaacctagtcggtaatag

SEQ ID NO: 14371 - RNA, 618 nt, synthetic construct
  source 1..618: mol_type = other RNA
caataaaagtgcgaaacgttatcctataagtaagaaagttttaaaattttcttacgaaaaggatagaacttaaaagttctaactgttctactaaagtaataagtgaaaatcttatttaaagcaaacaaccaagtagctttaagtctaagtcccctacacaagttttatactactatgcaaaacttgtgaagctaggtaaggtcgtaatccgtgaaagtcggatgcggggctccttaaaagattactatggtaaacataagctaatccattaagatgcgatttatatgtattttatactgttaaatatttttgtgcttgtggcttggtataaaacagttaagatgaagtacttaactggttttggaataattggttgttaaactaaaacattataaatcgttagtggatacctaaggtaatcaaaaatagggataggtagaatggaacgtttgatgctgtatatgaagaggtttagtagaacctaggacacatatacgggctcagcaggttcatagtagctatgatactcagccggaagtcaattaattttgaaatacttctatggtaacataggagaaggataaaactgagtgagccaaggaacctagtcggtaatag

SEQ ID NO: 14372 - RNA, 519 nt, synthetic construct
  source 1..519: mol_type = other RNA
gtgcgactagtaaagtgcttaataacaatgtggtgaaagcccaccagataacccattatctgagctcagacggtatgcattagaagtaattcttttgtgtaaagcccgtttaatttggtaaacagaccaaccaacctatatataaggatggtgagctatattactatggataaaatttttatgaattcacgttcgaagcgtattagagtgagttttatttagaaggaaaaaagtaaataaaattctaattaattgtataaacaatttttcgtttgtttattaatgggtcttatattaatgtacgtatagtgaaatcctaaggtagtaaataaggtgttattaagtaaactaggtaagcccaataatatcttcatatgatagtatgaagaagttcaagtgtaaatttgaatatatattagtgggtaaaggatattttaaaaagcgaatgtctcatattaatagtgagaataggtttatgactaattcgaaagaatgctgacttaaaattaatattaatat

SEQ ID NO: 14373 - RNA, 525 nt, synthetic construct
  source 1..525: mol_type = other RNA
gtgcgactagataagtacttaatagcaatgtggtgaaagtccacctgataacccatagtctgagctcagacggtatgcattagaagtaattcttttgtgtaaagcccgtttaatctggtctaaaggaccttccaccctaaatatatagggggagagctataatactaaggataaaatttttttgaattcatgtttaaagcgtattagaggaaatttatttctatgaaaaagaagaaataaatttttaattaactgtataaacaagttttcgtttgtttattagtgggtcttatgttaatgtacgtatagtggaatcctaaggtattaattaaggtgttattaagtaaactaggtaagcccaatagtgtcttcatattataatatgaagaagttcaattgtgaaattgaatatgcattagtgggtaaaggatattttaaaaagcgaatgtctcatattaatagtgagaataggtctatgactaattcgaaagaatgctgacttaaaattggtattaatatatgcgt

SEQ ID NO: 14374 - RNA, 464 nt, synthetic construct
  source 1..464: mol_type = other RNA
gtgcgacttgttaagttttaacaaaaattgtataacgtttattaatgattatacattgtatttcatcttacaatagcctaattagatatgcatttagggtaacttttttgtataaagctctaattataagtgtaaatacacttttaggcttcttctatggttagagaaatcgaaccaatgtaattaaaactttgatgtattaggcatttaacgtgtccttggttaaatgaagatgaacataagtatacaaagtaaaattggaacctaaggaagaattgtttttgttaagaaacaaggtaatacctataactggctaatataaatttgcaaggtttattgtaaaataaactataggttagaggtaaaaggataatgtaaaaagcgaatgcaattctgtaatggaattgatagggtatatacctaacttgaaagagtgctgacttacatatagatgttatttacgt

SEQ ID NO: 14375 - RNA, 538 nt, synthetic construct
  source 1..538: mol_type = other RNA
gtgcgactagtaaagtgtttaataataatgtggtgaaaacccaccagataacccattatctgagctcatacggtgtgcattaaaagtaatttttttgtataaagcccgtttaatcaggtaaataatccttccatcctaattatatctatagatataaaaggatggtgagctatattactatggataagatttttttgaattcacgtttgaagcgtattagagtaagttttatttaaaaggaaaaaaaaaaattaaataaaattaaattaattgtataaataagttttcgtttatttattaatgggtcttatattaatgtacgtatagtgaaatcctaatgtagtaattaaggtgttattaaataaactaggtaagcccaataatgtcttcataatatgaagaagttcaagtgtaaatttgaatatacattagtgggtaaaggatattttaaaaagcgaatgtctcatattaatagtgagaataggtctatgactaattcgaaagaatgctgacttaaaattaatattaatattaatat

SEQ ID NO: 14376 - RNA, 363 nt, synthetic construct
  source 1..363: mol_type = other RNA
caataaaagtgcgaaacgttatcctataagtaagaaagttttaaaattttcttacgaaaaggatagaacttaaaagttctaactgttctactaaagtaataagtgaaaatcttatttaaagcaaacaaccaagtagctttaagtctaagtcccctacacaagttttatactactatgcaaaacttgtgaagctaggtaaggtcgtaatccgtgaaagtcggatgcggggctccttaaaagattactatggtaaacataagctaatccattaagatgcgatttatatgtattttatactgttaaatatttttgtgcttgtggcttggtataaaacagttaagatgaagtacttaactggttttg

SEQ ID NO: 14377 - RNA, 441 nt, synthetic construct
  source 1..441: mol_type = other RNA
caataaaagtgcgaaacgttatcctataagtaagaaagttttaaaattttcttacgaaaaggatagaacttaaaagttctaactgttctactaaagtaataagtgaaaatcttatttaaagcaaacaaccaagtagctttaagtctaagtcccctacacaagttttatactactatgcaaaacttgtgaagctaggtaaggtcgtaatccgtgaaagtcggatgcggggctccttaaaagattactatggtaaacataagctaatccattaagatgcgatttatatgtattttatactgttaaatatttttgtgcttgtggcttggtataaaacagttaagatgaagtacttaactggttttggaataattggttgttaaactaaaacattataaatcgttagtggatacctaaggtaatcaaaaatagggataggtagaa

SEQ ID NO: 14378 - DNA, 989 bp, synthetic construct
  source 1..989: mol_type = other DNA
caaaggcttacctatcactagcgcgacacgttcctaagtgaaaagcttaggcactgtcgaactcaacagttcagcagtgaactgtcattctaagaagtcaaatgaaggagtaacgtctggaagggcttcccttaatcctccgacatgcaggaaagtaggcaagtactgaactgtgtgaagctcggtgaagtcggttgaaggttaccgtaaattagtatctctaatacgaaagctatccagcggtggatggtgtaactgatagaccggaggtctataaaacactcaaggttaggatgcgcgatgaactagaggcgatcgctagtaagcgcagacgaatccctgatggtacgggtctatatcgggagggaatcgaaaggttctctgacacaaataagtgtcgctactgtgggtgagtaaaactctcctttatgaaagcccatatatcgttacaggcgttattaaggtagcaggctcataggggaaacctaaaagtgtatgtacagataagaatgacggaacgtggtaagctgccgacatggagggcttgttctctttgaagtgttgccaaggaaagtcacaatgagattagttgtcgatataacttggtttaacggcagtgaaagtggtggcacagtaccgatgaaacgtgtaatgaacgtggagggatagccactagtcgattgaagattgaaggttactattggttaacatggtttcgagtaagactaagagatgtaatgctccaaagtaataaggaggttacagcccatgttaaagaaaaccaagctaagacataacgaatattatgatacacaaaaaaagtgtatgacaatttatactcgaacagtcttaacggtaacaatttctttcaattggaaacgatggaacgccgtatgcccggaaacgggcgcgtacggtgtggagtgggggaaaagctggagataatctcaaaggcttacctatcactatcgcgacacgttcctaagtga

SEQ ID NO: 14379 - DNA, 1028 bp, synthetic construct
  source 1..1028: mol_type = other DNA
gccatacaataaaagtgcgaaacgttatcctataagtaagaaagttttaaaattttcttacgaaaaggatagaacttaaaagttctaactgttctactaaagtaataagtgaaaatcttatttaaagcaaacaaccaagtagctttaagtctaagtcccctacacaagttttatactactatgcaaaacttgtgaagctaggtaaggtcgtaatccgtgaaagtcggatgcggggctccttaaaagattactatggtaaacataagctaatccattaagatgcgatttatatgtattttatactgttaaatatttttgtgcttgtggcttggtataaaacagttaagatgaagtacttaactggttttggaataattggttgttaaactaaaacattataaatcgttagtggatacctaaggtaatcaaaaatagggataggtagaatggaacgtttgatgctgtatatgaagaggtttagtagaacctaggacacatatacgggctcagcaggttcatagtagctatgatactcagccggaagtcaattaattttgaaatacttctatggtaacataggagaaggataaaactgagtgagccaaggaacctagtcggtaatagaaaagtggaagttaaaacaaatataagattttagaattaatttaattaatgaacggaattaatttaatgatatttaaagttagacggttataaattaaacatttcaaaattaaaccatatccaaattcataaatatagctagatcatatcactagtttaaaaataaataaatcatttcaaattactattaagtaaggtattaataccttacttaatagtaatctcattacataagagaattactagattagcagacagattcataaaaactatatcaactaggacaatagaaaatatatttatacacttcctattatcgagcgaacgccttatgcgatgaaagtcgcacgtagggtgtagaccaagcgaaatcctatgcatttaggatagtgaggtatagcaaa

SEQ ID NO: 14380 - DNA, 1028 bp, synthetic construct
  source 1..1028: mol_type = other DNA
gcaagacaataaaagtttgacacgtgatcctataagtaagaaagttttaaaattttcttacgaaaaggatagaacttaaaagttctaactgttctactaaagtaataagtgaaaatcttatttaaagcaaacaaccaagtagctttaagtctaagtcccctacacaagttttatactactatgcaaaacttgtgaagctaggtaaggtcgtaatccgtgaaagtcggatgcggggctccttaaaagattactatggtaaacataagctaatccattaagatgcgatttatatgtattttatactgttaaatatttttgtgcttgtggcttggtataaaacagttaagatgaagtacttaactggttttggaataattggttgttaaactaaaacattataaatcgttagtggatacctaaggtaatcaaaaatagggataggtagaatggaacgtttgatgctgtatatgaagaggtttagtagaacctaggacacatatacgggctcagcaggttcatagtagctatgatactcagccggaagtcaattaattttgaaatacttctatggtaacataggagaaggataaaactgagtgagccaaggaacctagtcggtaatagaaaagtggaagttaaaacaaatataagattttagaattaatttaattaatgaacggaattaatttaatgatatttaaagttagacggttataaattaaacatttcaaaattaaaccatatccaaattcataaatatagctagatcatatcactagtttaaaaataaataaatcatttcaaattactattaagtaaggtattaataccttacttaatagtaatctcattacataagagaattactagattagcagacagattcataaaaactatatcaactaggacaatagaaaatatatttatacacttcctattatcgagcgaacgccttatgcgatgaaagtcgcacgtagggtgtagaccaagcgaaatcctatgcatttaggatagtgaggtatagcaaa

SEQ ID NO: 14381 - DNA, 60 bp, synthetic construct
  source 1..60: mol_type = other DNA
gcaatagccgaaaaacaaaaaacaaaaaaaacaaaaaaaaaaccaaaaaaacaaaacaca

SEQ ID NO: 14382 - DNA, 20 bp, synthetic construct
  source 1..20: mol_type = other DNA
aaattataataattataata

SEQ ID NO: 14383 - DNA, 224 bp, synthetic construct
  source 1..224: mol_type = other DNA
atgaaaccggctcggattccgcccgcgtgcgccatcccctcagctagcaggtgtgagcggctttctgcccgcagtctctacacagctcagcatcctgacgcctcctccccttgcaggggcgtgaagctacttcagactctgctgtgacgacttggccgccaggcaccgatcctccccggtgagaaggtccacgaatcttactgcagacagatttgctcagcgcg

SEQ ID NO: 14384 - DNA, 24 bp, synthetic construct
  source 1..24: mol_type = other DNA
ctttcactactcctacgagcacca

SEQ ID NO: 14385 - DNA, 25 bp, synthetic construct
  source 1..25: mol_type = other DNA
gaccatgctcccaagcaagatcatg

SEQ ID NO: 14386 - DNA, 555 bp, synthetic construct
  source 1..555: mol_type = other DNA
atgggagtcaaagttctgtttgccctgatctgcatcgctgtggccgaggccaagcccaccgagaacaacgaagacttcaacatcgtggccgtggccagcaacttcgcgaccacggatctcgatgctgaccgcgggaagttgcccggcaagaagctgccgctggaggtgctcaaagagatggaagccaatgcccggaaagctggctgcaccaggggctgtctgatctgcctgtcccacatcaagtgcacgcccaagatgaagaagttcatcccaggacgctgccacacctacgaaggcgacaaagagtccgcacagggcggcataggcgaggcgatcgtcgacattcctgagattcctgggttcaaggacttggagcccatggagcagttcatcgcacaggtcgatctgtgtgtggactgcacaactggctgcctcaaagggcttgccaacgtgcagtgttctgacctgctcaagaagtggctgccgcaacgctgtgcgacctttgccagcaagatccagggccaggtggacaagatcaagggggccggtggtgac

SEQ ID NO: 14387 - DNA, 936 bp, synthetic construct
  source 1..936: mol_type = other DNA
atggcttccaaggtgtacgaccccgagcaacgcaaacgcatgatcactgggcctcagtggtgggctcgctgcaagcaaatgaacgtgctggactccttcatcaactactatgattccgagaagcacgccgagaacgccgtgatttttctgcatggtaacgctgcctccagctacctgtggaggcacgtcgtgcctcacatcgagcccgtggctagatgcatcatccctgatctgatcggaatgggtaagtccggcaagagcgggaatggctcatatcgcctcctggatcactacaagtacctcaccgcttggttcgagctgctgaaccttccaaagaaaatcatctttgtgggccacgactggggggcttgtctggcctttcactactcctacgagcaccaagacaagatcaaggccatcgtccatgctgagagtgtcgtggacgtgatcgagtcctgggacgagtggcctgacatcgaggaggatatcgccctgatcaagagcgaagagggcgagaaaatggtgcttgagaataacttcttcgtcgagaccatgctcccaagcaagatcatgcggaaactggagcctgaggagttcgctgcctacctggagccattcaaggagaagggcgaggttagacggcctaccctctcctggcctcgcgagatccctctcgttaagggaggcaagcccgacgtcgtccagattgtccgcaactacaacgcctaccttcgggccagcgacgatctgcctaagatgttcatcgagtccgaccctgggttcttttccaacgctattgtcgagggagctaagaagttccctaacaccgagttcgtgaaggtgaagggcctccacttcagccaggaggacgctccagatgaaatgggtaagtacatcaagagcttcgtggagcgcgtgctgaagaacgagcagtaa

SEQ ID NO: 14388 - DNA, 1160 bp, synthetic construct
  source 1..1160: mol_type = other DNA
atgaaaccggctcggattccgcccgcgtgcgccatcccctcagctagcaggtgtgagcggctttctgcccgcagtctctacacagctcagcatcctgacgcctcctccccttgcaggggcgtgaagctacttcagactctgctgtgacgacttggccgccaggcaccgatcctccccggtgagaaggtccacgaatcttactgcagacagatttgctcagcgcgatggcttccaaggtgtacgaccccgagcaacgcaaacgcatgatcactgggcctcagtggtgggctcgctgcaagcaaatgaacgtgctggactccttcatcaactactatgattccgagaagcacgccgagaacgccgtgatttttctgcatggtaacgctgcctccagctacctgtggaggcacgtcgtgcctcacatcgagcccgtggctagatgcatcatccctgatctgatcggaatgggtaagtccggcaagagcgggaatggctcatatcgcctcctggatcactacaagtacctcaccgcttggttcgagctgctgaaccttccaaagaaaatcatctttgtgggccacgactggggggcttgtctggcctttcactactcctacgagcaccaagacaagatcaaggccatcgtccatgctgagagtgtcgtggacgtgatcgagtcctgggacgagtggcctgacatcgaggaggatatcgccctgatcaagagcgaagagggcgagaaaatggtgcttgagaataacttcttcgtcgagaccatgctcccaagcaagatcatgcggaaactggagcctgaggagttcgctgcctacctggagccattcaaggagaagggcgaggttagacggcctaccctctcctggcctcgcgagatccctctcgttaagggaggcaagcccgacgtcgtccagattgtccgcaactacaacgcctaccttcgggccagcgacgatctgcctaagatgttcatcgagtccgaccctgggttcttttccaacgctattgtcgagggagctaagaagttccctaacaccgagttcgtgaaggtgaagggcctccacttcagccaggaggacgctccagatgaaatgggtaagtacatcaagagcttcgtggagcgcgtgctgaagaacgagcagtaa

SEQ ID NO: 14389 - DNA, 1061 bp, synthetic construct
  source 1..1061: mol_type = other DNA
agcaaagaccccaacgagaagcgcgatcacatggtcctgctggagttcgtgaccgccgccgggatcactctcggcatggacgagctgtacaagtaacaaacaaacaaaacaaaaacactcccctgtgaggaactactgtcttcacgcagaaagcgtctagccatggcgttagtatgagtgtcgtgcagcctccaggaccccccctcccgggagagccatagtggtctgcggaaccggtgagtacaccggaattgccaggacgaccgggtcctttcttggataaacccgctcaatgcctggagatttgggcgtgcccccgcaagactgctagccgagtagtgttgggtcgcgaaaggccttgtggtactgcctgatagggtgcttgcgagtgccccgggaggtctcgtagaccgtgcaccatgagcacgaatcctaaaatggtgagcaagggcgaggagctgttcaccggggtggtgcccatcctggtcgagctggacggcgacgtaaacggccacaagttcagcgtgtccggcgagggcgagggcgatgccacctacggcaagctgaccctgaagttcatctgcaccaccggcaagctgcccgtgccctggcccaccctcgtgaccaccctgacctacggcgtgcagtgcttcagccgctaccccgaccacatgaagcagcacgacttcttcaagtccgccatgcccgaaggctacgtccaggagcgcaccatcttcttcaaggacgacggcaactacaagacccgcgccgaggtgaagttcgagggcgacaccctggtgaaccgcatcgagctgaagggcatcgacttcaaggaggacggcaacatcctggggcacaagctggagtacaactacaacagccacaacgtctatatcatggccgacaagcagaagaacggcatcaaggtgaacttcaagatccgccacaacatcgaggacggcagcgtgcagctcgccgaccactaccagcagaacacccccatcggcgacggccccgtgctgctgcccgacaaccactacctgagcacccagtccgccctg

SEQ ID NO: 14390 - DNA, 899 bp, synthetic construct
  source 1..899: mol_type = other DNA
agcagttcatcgcacaggtcgatctgtgtgtggactgcacaactggctgcctcaaagggcttgccaacgtgcagtgttctgacctgctcaagaagtggctgccgcaacgctgtgcgacctttgccagcaagatccagggccaggtggacaagatcaagggggccggtggtgactaacaaacaaacaaaacaaaaacactcccctgtgaggaactactgtcttcacgcagaaagcgtctagccatggcgttagtatgagtgtcgtgcagcctccaggaccccccctcccgggagagccatagtggtctgcggaaccggtgagtacaccggaattgccaggacgaccgggtcctttcttggataaacccgctcaatgcctggagatttgggcgtgcccccgcaagactgctagccgagtagtgttgggtcgcgaaaggccttgtggtactgcctgatagggtgcttgcgagtgccccgggaggtctcgtagaccgtgcaccatgagcacgaatcctaaaatgggagtcaaagttctgtttgccctgatctgcatcgctgtggccgaggccaagcccaccgagaacaacgaagacttcaacatcgtggccgtggccagcaacttcgcgaccacggatctcgatgctgaccgcgggaagttgcccggcaagaagctgccgctggaggtgctcaaagagatggaagccaatgcccggaaagctggctgcaccaggggctgtctgatctgcctgtcccacatcaagtgcacgcccaagatgaagaagttcatcccaggacgctgccacacctacgaaggcgacaaagagtccgcacagggcggcataggcgaggcgatcgtcgacattcctgagattcctgggttcaaggacttggagcccatgg

SEQ ID NO: 14391 - DNA, 32 bp, synthetic construct
  source 1..32: mol_type = other DNA
aataccttacttaatagtaacaatagaaaatc

SEQ ID NO: 14392 - DNA, 33 bp, synthetic construct
  source 1..33: mol_type = other DNA
aagctagatcatattactattaagtaaggtatt

SEQ ID NO: 14393 - DNA, 1719 bp, synthetic construct
  source 1..1719: mol_type = other DNA
aataccttacttaatagtaacaatagaaaatcctattatcgagcgaacgccttatgcgatgaaagtcgcacgtagggtgtagaccaagcgaaatcctatgcatttaggatagtgaggtatagcaaaatggcttccaaggtgtacgaccccgagcaacgcaaacgcatgatcactgggcctcagtggtgggctcgctgcaagcaaatgaacgtgctggactccttcatcaactactatgattccgagaagcacgccgagaacgccgtgatttttctgcatggtaacgctgcctccagctacctgtggaggcacgtcgtgcctcacatcgagcccgtggctagatgcatcatccctgatctgatcggaatgggtaagtccggcaagagcgggaatggctcatatcgcctcctggatcactacaagtacctcaccgcttggttcgagctgctgaaccttccaaagaaaatcatctttgtgggccacgactggggggcttgtctggcctttcactactcctacgagcaccaagacaagatcaaggccatcgtccatgctgagagtgtcgtggacgtgatcgagtcctgggacgagtggcctgacatcgaggaggatatcgccctgatcaagagcgaagagggcgagaaaatggtgcttgagaataacttcttcgtcgagaccatgctcccaagcaagatcatgcggaaactggagcctgaggagttcgctgcctacctggagccattcaaggagaagggcgaggttagacggcctaccctctcctggcctcgcgagatccctctcgttaagggaggcaagcccgacgtcgtccagattgtccgcaactacaacgcctaccttcgggccagcgacgatctgcctaagatgttcatcgagtccgaccctgggttcttttccaacgctattgtcgagggagctaagaagttccctaacaccgagttcgtgaaggtgaagggcctccacttcagccaggaggacgctccagatgaaatgggtaagtacatcaagagcttcgtggagcgcgtgctgaagaacgagcagtaagccatacaataaaagtgcgaaacgttatcctataagtaagaaagttttaaaattttcttacgaaaaggatagaacttaaaagttctaactgttctactaaagtaataagtgaaaatcttatttaaagcaaacaaccaagtagctttaagtctaagtcccctacacaagttttatactactatgcaaaacttgtgaagctaggtaaggtcgtaatccgtgaaagtcggatgcggggctccttaaaagattactatggtaaacataagctaatccattaagatgcgatttatatgtattttatactgttaaatatttttgtgcttgtggcttggtataaaacagttaagatgaagtacttaactggttttggaataattggttgttaaactaaaacattataaatcgttagtggatacctaaggtaatcaaaaatagggataggtagaatggaacgtttgatgctgtatatgaagaggtttagtagaacctaggacacatatacgggctcagcaggttcatagtagctatgatactcagccggaagtcaattaattttgaaatacttctatggtaacataggagaaggataaaactgagtgagccaaggaacctagtcggtaatagaagctagatcatattactattaagtaaggtatt

SEQ ID NO: 14394 - RNA, 989 nt, synthetic construct; identical to SEQ ID NO: 14346
  source 1..989: mol_type = other RNA

SEQ ID NO: 14395 - RNA, 1028 nt, synthetic construct
  source 1..1028: mol_type = other RNA
gccatacaataaaagtgcgaaacgttatcctataagtaagaaagttttaaaattttcttacgaaaaggatagaacttaaaagttctaactgttctactaaagtaataagtgaaaatcttatttaaagcaaacaaccaagtagctttaagtctaagtcccctacacaagttttatactactatgcaaaacttgtgaagctaggtaaggtcgtaatccgtgaaagtcggatgcggggctccttaaaagattactatggtaaacataagctaatccattaagatgcgatttatatgtattttatactgttaaatatttttgtgcttgtggcttggtataaaacagttaagatgaagtacttaactggttttggaataattggttgttaaactaaaacattataaatcgttagtggatacctaaggtaatcaaaaatagggataggtagaatggaacgtttgatgctgtatatgaagaggtttagtagaacctaggacacatatacgggctcagcaggttcatagtagctatgatactcagccggaagtcaattaattttgaaatacttctatggtaacataggagaaggataaaactgagtgagccaaggaacctagtcggtaatagaaaagtggaagttaaaacaaatataagattttagaattaatttaattaatgaacggaattaatttaatgatatttaaagttagacggttataaattaaacatttcaaaattaaaccatatccaaattcataaatatagctagatcatatcactagtttaaaaataaataaatcatttcaaattactattaagtaaggtattaataccttacttaatagtaatctcattacataagagaattactagattagcagacagattcataaaaactatatcaactaggacaatagaaaatatatttatacacttcctattatcgagcgaacgccttatgcgatgaaagtcgcacgtagggtgtagaccaagcgaaatcctatgcatttaggatagtgaggtatagcaaa

SEQ ID NO: 14396 - RNA, 1028 nt, synthetic construct
  source 1..1028: mol_type = other RNA
gcaagacaataaaagtttgacacgtgatcctataagtaagaaagttttaaaattttcttacgaaaaggatagaacttaaaagttctaactgttctactaaagtaataagtgaaaatcttatttaaagcaaacaaccaagtagctttaagtctaagtcccctacacaagttttatactactatgcaaaacttgtgaagctaggtaaggtcgtaatccgtgaaagtcggatgcggggctccttaaaagattactatggtaaacataagctaatccattaagatgcgatttatatgtattttatactgttaaatatttttgtgcttgtggcttggtataaaacagttaagatgaagtacttaactggttttggaataattggttgttaaactaaaacattataaatcgttagtggatacctaaggtaatcaaaaatagggataggtagaatggaacgtttgatgctgtatatgaagaggtttagtagaacctaggacacatatacgggctcagcaggttcatagtagctatgatactcagccggaagtcaattaattttgaaatacttctatggtaacataggagaaggataaaactgagtgagccaaggaacctagtcggtaatagaaaagtggaagttaaaacaaatataagattttagaattaatttaattaatgaacggaattaatttaatgatatttaaagttagacggttataaattaaacatttcaaaattaaaccatatccaaattcataaatatagctagatcatatcactagtttaaaaataaataaatcatttcaaattactattaagtaaggtattaataccttacttaatagtaatctcattacataagagaattactagattagcagacagattcataaaaactatatcaactaggacaatagaaaatatatttatacacttcctattatcgagcgaacgccttatgcgatgaaagtcgcacgtagggtgtagaccaagcgaaatcctatgcatttaggatagtgaggtatagcaaa

SEQ ID NO: 14397 - RNA, 60 nt, synthetic construct
  source 1..60: mol_type = other RNA
gcaatagccgaaaaacaaaaaacaaaaaaaacaaaaaaaaaaccaaaaaaacaaaacaca

SEQ ID NO: 14398 - RNA, 20 nt, synthetic construct
  source 1..20: mol_type = other RNA
aaattataataattataata

SEQ ID NO: 14399 - RNA, 224 nt, synthetic construct
  source 1..224: mol_type = other RNA
atgaaaccggctcggattccgcccgcgtgcgccatcccctcagctagcaggtgtgagcggctttctgcccgcagtctctacacagctcagcatcctgacgcctcctccccttgcaggggcgtgaagctacttcagactctgctgtgacgacttggccgccaggcaccgatcctccccggtgagaaggtccacgaatcttactgcagacagatttgctcagcgcg

SEQ ID NO: 14400 - RNA, 24 nt, synthetic construct
  source 1..24: mol_type = other RNA
ctttcactactcctacgagcacca

SEQ ID NO: 14401 - RNA, 25 nt, synthetic construct
  source 1..25: mol_type = other RNA
gaccatgctcccaagcaagatcatg

SEQ ID NO: 14402 - RNA, 555 nt, synthetic construct
  source 1..555: mol_type = other RNA
atgggagtcaaagttctgtttgccctgatctgcatcgctgtggccgaggccaagcccaccgagaacaacgaagacttcaacatcgtggccgtggccagcaacttcgcgaccacggatctcgatgctgaccgcgggaagttgcccggcaagaagctgccgctggaggtgctcaaagagatggaagccaatgcccggaaagctggctgcaccaggggctgtctgatctgcctgtcccacatcaagtgcacgcccaagatgaagaagttcatcccaggacgctgccacacctacgaaggcgacaaagagtccgcacagggcggcataggcgaggcgatcgtcgacattcctgagattcctgggttcaaggacttggagcccatggagcagttcatcgcacaggtcgatctgtgtgtggactgcacaactggctgcctcaaagggcttgccaacgtgcagtgttctgacctgctcaagaagtggctgccgcaacgctgtgcgacctttgccagcaagatccagggccaggtggacaagatcaagggggccggtggtgac

SEQ ID NO: 14403 - RNA, 936 nt, synthetic construct; identical to SEQ ID NO: 14312
  source 1..936: mol_type = other RNA

SEQ ID NO: 14404 - RNA, 1160 nt, synthetic construct
  source 1..1160: mol_type = other RNA
atgaaaccggctcggattccgcccgcgtgcgccatcccctcagctagcaggtgtgagcggctttctgcccgcagtctctacacagctcagcatcctgacgcctcctccccttgcaggggcgtgaagctacttcagactctgctgtgacgacttggccgccaggcaccgatcctccccggtgagaaggtccacgaatcttactgcagacagatttgctcagcgcgatggcttccaaggtgtacgaccccgagcaacgcaaacgcatgatcactgggcctcagtggtgggctcgctgcaagcaaatgaacgtgctggactccttcatcaactactatgattccgagaagcacgccgagaacgccgtgatttttctgcatggtaacgctgcctccagctacctgtggaggcacgtcgtgcctcacatcgagcccgtggctagatgcatcatccctgatctgatcggaatgggtaagtccggcaagagcgggaatggctcatatcgcctcctggatcactacaagtacctcaccgcttggttcgagctgctgaaccttccaaagaaaatcatctttgtgggccacgactggggggcttgtctggcctttcactactcctacgagcaccaagacaagatcaaggccatcgtccatgctgagagtgtcgtggacgtgatcgagtcctgggacgagtggcctgacatcgaggaggatatcgccctgatcaagagcgaagagggcgagaaaatggtgcttgagaataacttcttcgtcgagaccatgctcccaagcaagatcatgcggaaactggagcctgaggagttcgctgcctacctggagccattcaaggagaagggcgaggttagacggcctaccctctcctggcctcgcgagatccctctcgttaagggaggcaagcccgacgtcgtccagattgtccgcaactacaacgcctaccttcgggccagcgacgatctgcctaagatgttcatcgagtccgaccctgggttcttttccaacgctattgtcgagggagctaagaagttccctaacaccgagttcgtgaaggtgaagggcctccacttcagccaggaggacgctccagatgaaatgggtaagtacatcaagagcttcgtggagcgcgtgctgaagaacgagcagtaa

SEQ ID NO: 14405 - RNA, 1061 nt, synthetic construct
  source 1..1061: mol_type = other RNA
agcaaagaccccaacgagaagcgcgatcacatggtcctgctggagttcgtgaccgccgccgggatcactctcggcatggacgagctgtacaagtaacaaacaaacaaaacaaaaacactcccctgtgaggaactactgtcttcacgcagaaagcgtctagccatggcgttagtatgagtgtcgtgcagcctccaggaccccccctcccgggagagccatagtggtctgcggaaccggtgagtacaccggaattgccaggacgaccgggtcctttcttggataaacccgctcaatgcctggagatttgggcgtgcccccgcaagactgctagccgagtagtgttgggtcgcgaaaggccttgtggtactgcctgatagggtgcttgcgagtgccccgggaggtctcgtagaccgtgcaccatgagcacgaatcctaaaatggtgagcaagggcgaggagctgttcaccggggtggtgcccatcctggtcgagctggacggcgacgtaaacggccacaagttcagcgtgtccggcgagggcgagggcgatgccacctacggcaagctgaccctgaagttcatctgcaccaccggcaagctgcccgtgccctggcccaccctcgtgaccaccctgacctacggcgtgcagtgcttcagccgctaccccgaccacatgaagcagcacgacttcttcaagtccgccatgcccgaaggctacgtccaggagcgcaccatcttcttcaaggacgacggcaactacaagacccgcgccgaggtgaagttcgagggcgacaccctggtgaaccgcatcgagctgaagggcatcgacttcaaggaggacggcaacatcctggggcacaagctggagtacaactacaacagccacaacgtctatatcatggccgacaagcagaagaacggcatcaaggtgaacttcaagatccgccacaacatcgaggacggcagcgtgcagctcgccgaccactaccagcagaacacccccatcggcgacggccccgtgctgctgcccgacaaccactacctgagcacccagtccgccctg

SEQ ID NO: 14406 - RNA, 899 nt, synthetic construct
  source 1..899: mol_type = other RNA
agcagttcatcgcacaggtcgatctgtgtgtggactgcacaactggctgcctcaaagggcttgccaacgtgcagtgttctgacctgctcaagaagtggctgccgcaacgctgtgcgacctttgccagcaagatccagggccaggtggacaagatcaagggggccggtggtgactaacaaacaaacaaaacaaaaacactcccctgtgaggaactactgtcttcacgcagaaagcgtctagccatggcgttagtatgagtgtcgtgcagcctccaggaccccccctcccgggagagccatagtggtctgcggaaccggtgagtacaccggaattgccaggacgaccgggtcctttcttggataaacccgctcaatgcctggagatttgggcgtgcccccgcaagactgctagccgagtagtgttgggtcgcgaaaggccttgtggtactgcctgatagggtgcttgcgagtgccccgggaggtctcgtagaccgtgcaccatgagcacgaatcctaaaatgggagtcaaagttctgtttgccctgatctgcatcgctgtggccgaggccaagcccaccgagaacaacgaagacttcaacatcgtggccgtggccagcaacttcgcgaccacggatctcgatgctgaccgcgggaagttgcccggcaagaagctgccgctggaggtgctcaaagagatggaagccaatgcccggaaagctggctgcaccaggggctgtctgatctgcctgtcccacatcaagtgcacgcccaagatgaagaagttcatcccaggacgctgccacacctacgaaggcgacaaagagtccgcacagggcggcataggcgaggcgatcgtcgacattcctgagattcctgggttcaaggacttggagcccatgg

SEQ ID NO: 14407 - RNA, 32 nt, synthetic construct
  source 1..32: mol_type = other RNA
aataccttacttaatagtaacaatagaaaatc

SEQ ID NO: 14408 - RNA, 33 nt, synthetic construct
  source 1..33: mol_type = other RNA
aagctagatcatattactattaagtaaggtatt

SEQ ID NO: 14409 - RNA, 1719 nt, synthetic construct
  source 1..1719: mol_type = other RNA
aataccttacttaatagtaacaatagaaaatcctattatcgagcgaacgccttatgcgatgaaagtcgcacgtagggtgtagaccaagcgaaatcctatgcatttaggatagtgaggtatagcaaaatggcttccaaggtgtacgaccccgagcaacgcaaacgcatgatcactgggcctcagtggtgggctcgctgcaagcaaatgaacgtgctggactccttcatcaactactatgattccgagaagcacgccgagaacgccgtgatttttctgcatggtaacgctgcctccagctacctgtggaggcacgtcgtgcctcacatcgagcccgtggctagatgcatcatccctgatctgatcggaatgggtaagtccggcaagagcgggaatggctcatatcgcctcctggatcactacaagtacctcaccgcttggttcgagctgctgaaccttccaaagaaaatcatctttgtgggccacgactggggggcttgtctggcctttcactactcctacgagcaccaagacaagatcaaggccatcgtccatgctgagagtgtcgtggacgtgatcgagtcctgggacgagtggcctgacatcgaggaggatatcgccctgatcaagagcgaagagggcgagaaaatggtgcttgagaataacttcttcgtcgagaccatgctcccaagcaagatcatgcggaaactggagcctgaggagttcgctgcctacctggagccattcaaggagaagggcgaggttagacggcctaccctctcctggcctcgcgagatccctctcgttaagggaggcaagcccgacgtcgtccagattgtccgcaactacaacgcctaccttcgggccagcgacgatctgcctaagatgttcatcgagtccgaccctgggttcttttccaacgctattgtcgagggagctaagaagttccctaacaccgagttcgtgaaggtgaagggcctccacttcagccaggaggacgctccagatgaaatgggtaagtacatcaagagcttcgtggagcgcgtgctgaagaacgagcagtaagccatacaataaaagtgcgaaacgttatcctataagtaagaaagttttaaaattttcttacgaaaaggatagaacttaaaagttctaactgttctactaaagtaataagtgaaaatcttatttaaagcaaacaaccaagtagctttaagtctaagtcccctacacaagttttatactactatgcaaaacttgtgaagctaggtaaggtcgtaatccgtgaaagtcggatgcggggctccttaaaagattactatggtaaacataagctaatccattaagatgcgatttatatgtattttatactgttaaatatttttgtgcttgtggcttggtataaaacagttaagatgaagtacttaactggttttggaataattggttgttaaactaaaacattataaatcgttagtggatacctaaggtaatcaaaaatagggataggtagaatggaacgtttgatgctgtatatgaagaggtttagtagaacctaggacacatatacgggctcagcaggttcatagtagctatgatactcagccggaagtcaattaattttgaaatacttctatggtaacataggagaaggataaaactgagtgagccaaggaacctagtcggtaatagaagctagatcatattactattaagtaaggtatt

SEQ ID NO: 14410 - RNA, 20 nt, synthetic construct
  source 1..20: mol_type = other RNA
aataccttacttaatagtaa

SEQ ID NO: 14411 - RNA, 20 nt, synthetic construct
  source 1..20: mol_type = other RNA
ttactattaagtaaggtatt

SEQ ID NO: 14412 - RNA, 50 nt, synthetic construct
  source 1..50: mol_type = other RNA
aaaaacaaaaaacaaaaaaaacaaaaaaaaaaccaaaaaaacaaaacaca

SEQ ID NO: 14413 - RNA, 20 nt, synthetic construct
  source 1..20: mol_type = other RNA
aaccaaaaaaacaaaacaca

SEQ ID NO: 14414 - RNA, 12 nt, synthetic construct
  source 1..12: mol_type = other RNA
gcgtgagtcaag

SEQ ID NO: 14415 - RNA, 12 nt, synthetic construct
  source 1..12: mol_type = other RNA
ataatgggttag

SEQ ID NO: 14416 - RNA, 12 nt, synthetic construct
  source 1..12: mol_type = other RNA
ctaactgggcgt

SEQ ID NO: 14417 - RNA, 12 nt, synthetic construct
  source 1..12: mol_type = other RNA
cttatgtttcaa

SEQ ID NO: 14418 - RNA, 12 nt, synthetic construct
  source 1..12: mol_type = other RNA
tatataatatat

SEQ ID NO: 14419 - RNA, 74 nt, synthetic construct
  source 1..74: mol_type = other RNA
taaaaaaaaaaaaaaaaaaaaaaaaaaaaaaaaaaaaaaaaaaaaaaaaaaaaaaaaaaaaaaaaaaaatataa

SEQ ID NO: 14420 - RNA, 12 nt, synthetic construct
  source 1..12: mol_type = other RNA
tatataatatat

SEQ ID NO: 14421 - RNA, 12 nt, synthetic construct
  source 1..12: mol_type = other RNA
tataatatatat

SEQ ID NO: 14422 - RNA, 12 nt, synthetic construct
  source 1..12: mol_type = other RNA
tatatataatat

SEQ ID NO: 14423 - RNA, 12 nt, synthetic construct
  source 1..12: mol_type = other RNA
caaaaatatatt

SEQ ID NO: 14424 - RNA, 12 nt, synthetic construct
  source 1..12: mol_type = other RNA
aatataatatac

SEQ ID NO: 14425 - RNA, 12 nt, synthetic construct
  source 1..12: mol_type = other RNA
aataaaaaaaat

SEQ ID NO: 14426 - RNA, 12 nt, synthetic construct
  source 1..12: mol_type = other RNA
taatataaataa

SEQ ID NO: 14427 - RNA, 12 nt, synthetic construct
  source 1..12: mol_type = other RNA
taataaatataa

SEQ ID NO: 14428 - RNA, 18 nt, synthetic construct
  source 1..18: mol_type = other RNA
gaataaataacaatatat

SEQ ID NO: 14429 - RNA, 18 nt, synthetic construct
  source 1..18: mol_type = other RNA
gcagaaatataaatagaa

SEQ ID NO: 14430 - RNA, 18 nt, synthetic construct
  source 1..18: mol_type = other RNA
agatagatatatatatag

SEQ ID NO: 14431 - RNA, 18 nt, synthetic construct
  source 1..18: mol_type = other RNA
tcctaaatatattaataa

SEQ ID NO: 14432 - RNA, 18 nt, synthetic construct
  source 1..18: mol_type = other RNA
aaacaaatataataaact

SEQ ID NO: 14433 - RNA, 18 nt, synthetic construct
  source 1..18: mol_type = other RNA
agacaaatatataaaagt

SEQ ID NO: 14434 - RNA, 18 nt, synthetic construct
  source 1..18: mol_type = other RNA
ccaaaaatatataactga

SEQ ID NO: 14435 - RNA, 18 nt, synthetic construct
  source 1..18: mol_type = other RNA
tgagagatataaaaataa

SEQ ID NO: 14436 - RNA, 18 nt, synthetic construct
  source 1..18: mol_type = other RNA
ccataaataaattaacat

SEQ ID NO: 14437 - RNA, 18 nt, synthetic construct
  source 1..18: mol_type = other RNA
ggacaaatataaaaatcc

SEQ ID NO: 14438 - RNA, 18 nt, synthetic construct
  source 1..18: mol_type = other RNA
ggacaaatatatatagag

SEQ ID NO: 14439 - RNA, 18 nt, synthetic construct
  source 1..18: mol_type = other RNA
cgataaatataaagaagg

SEQ ID NO: 14440 - RNA, 18 nt, synthetic construct
  source 1..18: mol_type = other RNA
gaacaaataataaaaaga

SEQ ID NO: 14441 - RNA, 18 nt, synthetic construct
  source 1..18: mol_type = other RNA
agaaaaatagataaatat

SEQ ID NO: 14442 - RNA, 18 nt, synthetic construct
  source 1..18: mol_type = other RNA
aaaacaatataaaaatat

SEQ ID NO: 14443 - RNA, 18 nt, synthetic construct
  source 1..18: mol_type = other RNA
cagtgaatatatatatat

SEQ ID NO: 14444 - RNA, 18 nt, synthetic construct
  source 1..18: mol_type = other RNA
agtgtaataaatatatat

SEQ ID NO: 14445 - RNA, 18 nt, synthetic construct
  source 1..18: mol_type = other RNA
tattaaaaaaaaaaacaa

SEQ ID NO: 14446 - RNA, 18 nt, synthetic construct
  source 1..18: mol_type = other RNA
gagaaaaaatataaatgt

SEQ ID NO: 14447 - RNA, 18 nt, synthetic construct
  source 1..18: mol_type = other RNA
gatatatgaaatatataa

SEQ ID NO: 14448 - RNA, 18 nt, synthetic construct
  source 1..18: mol_type = other RNA
ttgagaaaaaataaatat

SEQ ID NO: 14449 - RNA, 18 nt, synthetic construct
  source 1..18: mol_type = other RNA
ctaataaaatatacattg

SEQ ID NO: 14450 - RNA, 18 nt, synthetic construct
  source 1..18: mol_type = other RNA
tcgaaaaaatatatagag

SEQ ID NO: 14451 - RNA, 18 nt, synthetic construct
  source 1..18: mol_type = other RNA
gagttaaaaaataaatag

SEQ ID NO: 14452 - RNA, 18 nt, synthetic construct
  source 1..18: mol_type = other RNA
gcatgaataaaaaaaata

SEQ ID NO: 14453 - RNA, 18 nt, synthetic construct
  source 1..18: mol_type = other RNA
ggatacataaaataaata

SEQ ID NO: 14454 - RNA, 18 nt, synthetic construct
  source 1..18: mol_type = other RNA
ggatacataaataaaata

SEQ ID NO: 14455 - RNA, 18 nt, synthetic construct
  source 1..18: mol_type = other RNA
gcgagaatataaatataa

SEQ ID NO: 14456 - RNA, 18 nt, synthetic construct
  source 1..18: mol_type = other RNA
caaaacatataaaaatat

SEQ ID NO: 14457 - RNA, 18 nt, synthetic construct
  source 1..18: mol_type = other RNA
taaaacatataaaaaaaa

SEQ ID NO: 14458 - RNA, 18 nt, synthetic construct
  source 1..18: mol_type = other RNA
taataaataataagaaat

SEQ ID NO: 14459 - RNA, 18 nt, synthetic construct
  source 1..18: mol_type = other RNA
acaaaaataaatacaaaa

SEQ ID NO: 14460 - RNA, 18 nt, synthetic construct
  source 1..18: mol_type = other RNA
aatcataaaaataaatag

SEQ ID NO: 14461 - RNA, 18 nt, synthetic construct
  source 1..18: mol_type = other RNA
aataaaaaaaatagatac

SEQ ID NO: 14462 - RNA, 18 nt, synthetic construct
  source 1..18: mol_type = other RNA
aatcataaataaaaatag

SEQ ID NO: 14463 - RNA, 18 nt, synthetic construct
  source 1..18: mol_type = other RNA
acatatataaatacataa

SEQ ID NO: 14464 - RNA, 18 nt, synthetic construct
  source 1..18: mol_type = other RNA
tgttaaatatataaaaac

SEQ ID NO: 14465 - RNA, 18 nt, synthetic construct
  source 1..18: mol_type = other RNA
agaaaaaaatataaaagc

SEQ ID NO: 14466 - RNA, 18 nt, synthetic construct
  source 1..18: mol_type = other RNA
aaaaatatatattaaagc

SEQ ID NO: 14467 - RNA, 18 nt, synthetic construct
  source 1..18: mol_type = other RNA
taggataaatataaatat

SEQ ID NO: 14468 - RNA, 50 nt, synthetic construct
  source 1..50: mol_type = other RNA
acgtcaattaataaacgacaaatcctgtccatcagattaaatataacggt

SEQ ID NO: 14469 - RNA, 50 nt, synthetic construct
  source 1..50: mol_type = other RNA
gccatttattcgcactgacaaattgatcattgtataatataataaatcta

SEQ ID NO: 14470 - RNA, 50 nt, synthetic construct
  source 1..50: mol_type = other RNA
aatctaaaaatgccgagctacatagatatataaatctctatataatctag

SEQ ID NO: 14471 - RNA, 50 nt, synthetic construct
  source 1..50: mol_type = other RNA
agtatactctagtaataaaggaaagaacatcttgatgcaaatatataaac

SEQ ID NO: 14472 - RNA, 50 nt, synthetic construct
  source 1..50: mol_type = other RNA
ggtcgagactataaaatatgattgattaaaacacctgctggaaaaaataa

SEQ ID NO: 14473 - RNA, 50 nt, synthetic construct
  source 1..50: mol_type = other RNA
atgcatggactataaaattacataccgccctggataatacaaaatactga

SEQ ID NO: 14474 - RNA, 50 nt, synthetic construct
  source 1..50: mol_type = other RNA
cgggctggataatctcgttcaataattaattaaaggtataaaataaacac

SEQ ID NO: 14475 - RNA, 50 nt, synthetic construct
  source 1..50: mol_type = other RNA
tatatgtcacatataacaactataataatgaaatgtaataaatctttagt

SEQ ID NO: 14476 - RNA, 50 nt, synthetic construct
  source 1..50: mol_type = other RNA
gaccatatgcatataacgtctataaatatgaaaagtaataaatctctaga

SEQ ID NO: 14477 - RNA, 50 nt, synthetic construct
  source 1..50: mol_type = other RNA
atggcgagctattaataaattccaatgcatatttaaatatattagggaat

SEQ ID NO: 14478 - RNA, 50 nt, synthetic construct
  source 1..50: mol_type = other RNA
gcggatgaacgtattccatgaataattaattatacgaaggaaataaacat

SEQ ID NO: 14479 - RNA, 50 nt, synthetic construct
  source 1..50: mol_type = other RNA
tttatgcactaccattaaaatatattggcgaaaaattttataagatatga

SEQ ID NO: 14480 - RNA, 50 nt, synthetic construct
  source 1..50: mol_type = other RNA
gctatgtactctaaaaaataattgattaaaccaatgattataaaatctac

SEQ ID NO: 14481 - RNA, 50 nt, synthetic construct
  source 1..50: mol_type = other RNA
ctataattaacaaatctgacctgggattatatattaagatattagaaccc

SEQ ID NO: 14482 - RNA, 50 nt, synthetic construct
  source 1..50: mol_type = other RNA
gtataattaaccaatccgccgtgggattatatattaagaaatataccggt

SEQ ID NO: 14483 - RNA, 50 nt, synthetic construct
  source 1..50: mol_type = other RNA
tatagtatgcatataacgtctataaatatgaaatgtaataaatctctcga

SEQ ID NO: 14484 - RNA, 50 nt, synthetic construct
  source 1..50: mol_type = other RNA
tgcagatattaataatgggggataccatactacacaaataatatatcgag

SEQ ID NO: 14485 - RNA, 50 nt, synthetic construct
  source 1..50: mol_type = other RNA
gaggataaaggagataattacataacgtcttggctaatacaaaaaaagaa

SEQ ID NO: 14486 - RNA, 50 nt, synthetic construct
  source 1..50: mol_type = other RNA
tcactcatttttacataaatatattcaacacaagctgctggaaaatataa

SEQ ID NO: 14487 - RNA, 50 nt, synthetic construct
  source 1..50: mol_type = other RNA
ttaaaaatttataagcgctacataaatatcttgagcgctgtaaaaaatta

SEQ ID NO: 14488 - RNA, 50 nt, synthetic construct
  source 1..50: mol_type = other RNA
gagaaattcttttaataaattcgaatgcatctgtaaatataataggtaat

SEQ ID NO: 14489 - RNA, 50 nt, synthetic construct
  source 1..50: mol_type = other RNA
tcatagaattttatacagagagatatgagatcacgtaataaatatctagt

SEQ ID NO: 14490 - RNA, 50 nt, synthetic construct
  source 1..50: mol_type = other RNA
agaagaataaagcgaggcctcgatttaatacaagtattatgaatatataa

SEQ ID NO: 14491 - RNA, 50 nt, synthetic construct
  source 1..50: mol_type = other RNA
ggaatacaacgcataaaattggacttaatatactcccccagaaaatataa

SEQ ID NO: 14492 - RNA, 50 nt, synthetic construct
  source 1..50: mol_type = other RNA
catgatgttcaattaatattcgagtttacataatgtaataaatctctaat

SEQ ID NO: 14493 - RNA, 50 nt, synthetic construct
  source 1..50: mol_type = other RNA
gcactcatctttacaaaaatatatacgacacgtgctgctgtaaaatataa

SEQ ID NO: 14494 - RNA, 50 nt, synthetic construct
  source 1..50: mol_type = other RNA
ggcagatattttatagagagagatgttagatcatggaatataaaattcat

SEQ ID NO: 14495 - RNA, 50 nt, synthetic construct
  source 1..50: mol_type = other RNA
gctctcaactgtacataaatatatacgacataagcagctggacaatataa

SEQ ID NO: 14496 - RNA, 50 nt, synthetic construct
  source 1..50: mol_type = other RNA
ctataattaacaaatccaaaattattgcgaatctgactaaattatagatt

SEQ ID NO: 14497 - RNA, 50 nt, synthetic construct
  source 1..50: mol_type = other RNA
gcactcatctttaaaatataaatgattaaacaacctgccggaaaatatat

SEQ ID NO: 14498 - RNA, 50 nt, synthetic construct
  source 1..50: mol_type = other RNA
tatgtgtgataatctcgttgaaaaattaattagaggtataaaataaacag

SEQ ID NO: 14499 - RNA, 50 nt, synthetic construct
  source 1..50: mol_type = other RNA
tatatgtcccatttaacgattataaatatgtaaaggtataactaaaataa

SEQ ID NO: 14500 - RNA, 50 nt, synthetic construct
  source 1..50: mol_type = other RNA
ggtatactctagtaataaaggtaggataaataaactgctggaaaatataa

SEQ ID NO: 14501 - RNA, 50 nt, synthetic construct
  source 1..50: mol_type = other RNA
gatcgggaccgtaaaatataatttattaaaacaatataaaaagttgcaca

SEQ ID NO: 14502 - RNA, 50 nt, synthetic construct
  source 1..50: mol_type = other RNA
ggtatacatcggagaaaattcaactgaatattctcctacgaaaaatataa

SEQ ID NO: 14503 - RNA, 50 nt, synthetic construct
  source 1..50: mol_type = other RNA
gcactcaactttacaaaaaaatttttgcgattcttaataaattatagact

SEQ ID NO: 14504 - RNA, 50 nt, synthetic construct
  source 1..50: mol_type = other RNA
ggaatacaacagataatattcttatctatattcttccaccgaaaaaataa

SEQ ID NO: 14505 - RNA, 50 nt, synthetic construct
  source 1..50: mol_type = other RNA
cgcgagctatttacataaatatatacaacacatttaatgtagcagataaa

SEQ ID NO: 14506 - RNA, 50 nt, synthetic construct
  source 1..50: mol_type = other RNA
cgtgtgtgataatttcataatagaaatatttaaaggtctaaaataaacag

SEQ ID NO: 14507 - RNA, 50 nt, synthetic construct
  source 1..50: mol_type = other RNA
gatgagttccattaataaattccaagactggaactaaaattgaatatata

SEQ ID NO: 14508 - RNA, 50 nt, synthetic construct
  source 1..50: mol_type = other RNA
cttccacgtggttaagaaatatattgaatatactcccccgaaatacattc

SEQ ID NO: 14509 - RNA, 50 nt, synthetic construct
  source 1..50: mol_type = other RNA
tatatttcacatataacgactataattacgaaaagtaataaatctctact

SEQ ID NO: 14510 - RNA, 50 nt, synthetic construct
  source 1..50: mol_type = other RNA
cgtgaattaggcataaaaatcctggccgaaatatatagcggtccaattaa

SEQ ID NO: 14511 - RNA, 50 nt, synthetic construct
  source 1..50: mol_type = other RNA
tatatttcagctataataactagaatttatatattatactactaaccggt

SEQ ID NO: 14512 - RNA, 50 nt, synthetic construct
  source 1..50: mol_type = other RNA
cggccaaagatgcaaaacttcgtaattaatattataatataaaatgctca

SEQ ID NO: 14513 - RNA, 50 nt, synthetic construct
  source 1..50: mol_type = other RNA
cgccatatgatatataattagatagggcgtggtttaatatacgagataac

SEQ ID NO: 14514 - RNA, 50 nt, synthetic construct
  source 1..50: mol_type = other RNA
ccgcgtgcaagacaccattccgcgtaaatattataactataataatataa

SEQ ID NO: 14515 - RNA, 50 nt, synthetic construct
  source 1..50: mol_type = other RNA
gttctaccgcccataaaaatcaactaaataatctctacccgaaaatatat

SEQ ID NO: 14516 - RNA, 50 nt, synthetic construct
  source 1..50: mol_type = other RNA
gaggatagactcgaaaaatacatatagcctggtttaatccaaaataagtg

SEQ ID NO: 14517 - RNA, 50 nt, synthetic construct
  source 1..50: mol_type = other RNA
ctataattaacatttcgttgaaaaatcaattaaaggtataaattaaacag

SEQ ID NO: 14518 - RNA, 50 nt, synthetic construct
  source 1..50: mol_type = other RNA
gaagcacctggttaagaaatatataccagacagatatacgaaatacattc

SEQ ID NO: 14519 - RNA, 50 nt, synthetic construct
  source 1..50: mol_type = other RNA
gtcgaaacctgcaaatattaaatacatcattcttgaatatattggaagac

SEQ ID NO: 14520 - RNA, 50 nt, synthetic construct
  source 1..50: mol_type = other RNA
agaactactaattcggaatagacggatatataaatttctatataatgtag

SEQ ID NO: 14521 - RNA, 50 nt, synthetic construct
  source 1..50: mol_type = other RNA
tatatatcccgtttaacgactataaataagaattgtataaattctctaag

SEQ ID NO: 14522 - RNA, 50 nt, synthetic construct
  source 1..50: mol_type = other RNA
aattatgtataattaacgagtaaaattatgaaaagtaataaaactctacc

SEQ ID NO: 14523 - RNA, 50 nt, synthetic construct
  source 1..50: mol_type = other RNA
ggccatatgcatatagcatctataaatatgaaatgtaataaatctctaga

SEQ ID NO: 14524 - RNA, 50 nt, synthetic construct
  source 1..50: mol_type = other RNA
gaaatcatgcatataacgtccatagatcatgttttaataaattataagat

SEQ ID NO: 14525 - RNA, 50 nt, synthetic construct
  source 1..50: mol_type = other RNA
ggccatacatgcataaattaattacggccctgttaattaataaatctaga

SEQ ID NO: 14526 - RNA, 50 nt, synthetic construct
  source 1..50: mol_type = other RNA
ggccatatgcatataacgtctataaatatacatgctgctgggaaaaataa

SEQ ID NO: 14527 - RNA, 50 nt, synthetic construct
  source 1..50: mol_type = other RNA
gtacaattaacaaatccaaaattatatatgaaaagtaacaaatctctaga

SEQ ID NO: 14528 - RNA, 50 nt, synthetic construct
  source 1..50: mol_type = other RNA
ggccatagccattaataaattccaagagtgtaactaaaattgaaaatatt

SEQ ID NO: 14529 - RNA, 50 nt, synthetic construct
  source 1..50: mol_type = other RNA
atataattaacaaatctgacctgggattatatattaagatatttgaaccc

SEQ ID NO: 14530 - RNA, 50 nt, synthetic construct
  source 1..50: mol_type = other RNA
gatgagttccattaataaattccaagattgtagctaaaattgaatatata

SEQ ID NO: 14531 - RNA, 50 nt, synthetic construct
  source 1..50: mol_type = other RNA
gcataattaataaatccataattattgcgaatccctctaaatcatagatt

SEQ ID NO: 14532 - RNA, 50 nt, synthetic construct
  source 1..50: mol_type = other RNA
cggactattaatttgcaatagaaggatatataaatttctatttaataact

SEQ ID NO: 14533 - RNA, 50 nt, synthetic construct
  source 1..50: mol_type = other RNA
ttggtttttcagtaagaattccctagaatattatatcctaatatataata

SEQ ID NO: 14534 - RNA, 50 nt, synthetic construct
  source 1..50: mol_type = other RNA
ctataaataaccaatccgcccttggatgtaatattaagaaattagaatcc

SEQ ID NO: 14535 - RNA, 50 nt, synthetic construct
  source 1..50: mol_type = other RNA
gcactgatctttacataaaaatatacaacacatgctcctctaaaatataa

SEQ ID NO: 14536 - RNA, 50 nt, synthetic construct
  source 1..50: mol_type = other RNA
gcactcatctttacataaatatatacaacacatggtgctgtaaaatatat

SEQ ID NO: 14537 - RNA, 50 nt, synthetic construct
  source 1..50: mol_type = other RNA
tcactctattgtaataaataaatcaaaacacaacctgcgtcaaaatataa

SEQ ID NO: 14538 - RNA, 50 nt, synthetic construct
  source 1..50: mol_type = other RNA
gctctacgtgggttacaaatatatacattctacatataaagagtgaagac

SEQ ID NO: 14539 - RNA, 50 nt, synthetic construct
  source 1..50: mol_type = other RNA
gcattcatctgtacataaaaatatacgacacgtgctgctgtaaaatataa

SEQ ID NO: 14540 - RNA, 50 nt, synthetic construct
  source 1..50: mol_type = other RNA
tctaggctatttacataaatatatacgacacatgctgctggaaaaaataa

SEQ ID NO: 14541 - RNA, 50 nt, synthetic construct
  source 1..50: mol_type = other RNA
gcattcgtctttaaaaaaatatatacaacactagctgcagggaaaaataa

SEQ ID NO: 14542 - RNA, 50 nt, synthetic construct
  source 1..50: mol_type = other RNA
gaacttggacaataaaaattgcattgaatatactcccccaaataatacaa

SEQ ID NO: 14543 - RNA, 50 nt, synthetic construct
  source 1..50: mol_type = other RNA
gcattcatctttacataaatatatagaacacatgctgctctaaaatataa

SEQ ID NO: 14544 - RNA, 50 nt, synthetic construct
  source 1..50: mol_type = other RNA
gaattcatctctacaaaaatatatacgacactagctgcagggaaaaataa

SEQ ID NO: 14545 - RNA, 50 nt, synthetic construct
  source 1..50: mol_type = other RNA
gaccaaaaatacaaagacaaaatgcatcatacttgaaaatattggacgac

SEQ ID NO: 14546 - RNA, 50 nt, synthetic construct
  source 1..50: mol_type = other RNA
gaaccaatatataagataaattctggtacactccgtgcatatatttaaat

SEQ ID NO: 14547 - RNA, 50 nt, synthetic construct
  source 1..50: mol_type = other RNA
tttactctatttacaaaaatatatacaacacaaggtgctggaaaataaaa

SEQ ID NO: 14548 - RNA, 50 nt, synthetic construct
  source 1..50: mol_type = other RNA
gatcgacatgtattagaaatatattcaactcacatataaaaagtagcaat

SEQ ID NO: 14549 - RNA, 50 nt, synthetic construct
  source 1..50: mol_type = other RNA
gttcgacatgcattaaaaagatattcaacacacatatacatagtaaataa

SEQ ID NO: 14550 - RNA, 50 nt, synthetic construct
  source 1..50: mol_type = other RNA
acgtcaattaatacactgaatatccacacagacttaaaattgaatatatt

SEQ ID NO: 14551 - RNA, 50 nt, synthetic construct
  source 1..50: mol_type = other RNA
ctctaattaccaaatccattctgggattaaatactaaaattataacatat

SEQ ID NO: 14552 - RNA, 50 nt, synthetic construct
  source 1..50: mol_type = other RNA
gcactcatctttacataaataaatacgactcgtgctggtgttaaatataa

SEQ ID NO: 14553 - RNA, 50 nt, synthetic construct
  source 1..50: mol_type = other RNA
tcccctcataaattgcaatatatggatatatttattcctgattataaatt

SEQ ID NO: 14554 - RNA, 50 nt, synthetic construct
  source 1..50: mol_type = other RNA
atgcgtgccagttagaagacattctctcactgttgaatataaaaaaataa

SEQ ID NO: 14555 - RNA, 50 nt, synthetic construct
  source 1..50: mol_type = other RNA
gcagtcatcattacaaaaatataaacgacacatgctgctggaaaaaataa

SEQ ID NO: 14556 - RNA, 50 nt, synthetic construct
  source 1..50: mol_type = other RNA
tgccataagaacataacgtccatagatgtaatattaagaaattagaatcc

SEQ ID NO: 14557 - RNA, 50 nt, synthetic construct
  source 1..50: mol_type = other RNA
tctacgaaatttatgcgatgaataattagattcttcctaaataatagata

SEQ ID NO: 14558 - RNA, 50 nt, synthetic construct
  source 1..50: mol_type = other RNA
gtccagggacgataaaattacataacttctgaaagtaataaatatccagc

SEQ ID NO: 14559 - RNA, 50 nt, synthetic construct
  source 1..50: mol_type = other RNA
gcattcatctcttcatatatatatacaagtcaggcaaacataaaaaaccc

SEQ ID NO: 14560 - RNA, 50 nt, synthetic construct
  source 1..50: mol_type = other RNA
tagcgtgttaccgataagacatttgatcactgctgaatataaaaaaataa

SEQ ID NO: 14561 - RNA, 50 nt, synthetic construct
  source 1..50: mol_type = other RNA
gatacgcgattaatactcgaataatagaaataatttttatcgaatagtat

SEQ ID NO: 14562 - RNA, 50 nt, synthetic construct
  source 1..50: mol_type = other RNA
tactgcgattataggaagataagttgataatttaattgattaaaaaaaat

SEQ ID NO: 14563 - RNA, 50 nt, synthetic construct
  source 1..50: mol_type = other RNA
ttatgaatataagattccaataactccaccgaggaatatccataaataca

SEQ ID NO: 14564 - RNA, 50 nt, synthetic construct
  source 1..50: mol_type = other RNA
ggcccattaatattaaaagacatctagaaatacataaggactaattcaac

SEQ ID NO: 14565 - RNA, 50 nt, synthetic construct
  source 1..50: mol_type = other RNA
gaattttgagtctatataacgacagatatagaagacataaatacagagcc

SEQ ID NO: 14566 - RNA, 50 nt, synthetic construct
  source 1..50: mol_type = other RNA
atatgaatataagagaacaaaaagaacgataatattagagccccacacag

SEQ ID NO: 14567 - RNA, 50 nt, synthetic construct
  source 1..50: mol_type = other RNA
aatttaaactgatataatgagtcaaagaaataatatttgaactagatgtg

SEQ ID NO: 14568 - RNA, 50 nt, synthetic construct
  source 1..50: mol_type = other RNA
taatgaatataagattccattaacttcacggaggaatatccataaatacg

SEQ ID NO: 14569 - RNA, 50 nt, synthetic construct
  source 1..50: mol_type = other RNA
ttagctggatgcctaaaatataccccaacggagtaatattaataaatacg

SEQ ID NO: 14570 - RNA, 50 nt, synthetic construct
  source 1..50: mol_type = other RNA
atcatataaatactaaaatgacccttgaaatatagggtaccagaagagat

SEQ ID NO: 14571 - RNA, 50 nt, synthetic construct
  source 1..50: mol_type = other RNA
atacgatcgatagaatgttatttctcaacggaagaatataaaaaattaag

SEQ ID NO: 14572 - RNA, 50 nt, synthetic construct
  source 1..50: mol_type = other RNA
gcgtctggttgcctaaaataagtccgacctgaagacaaaaataaatatca

SEQ ID NO: 14573 - RNA, 50 nt, synthetic construct
  source 1..50: mol_type = other RNA
gatatagctataaacggagttcaagatatagaagacataaatacagactc

SEQ ID NO: 14574 - RNA, 50 nt, synthetic construct
  source 1..50: mol_type = other RNA
gaacgcggaagaatgaaatatccctgagagaagagtataaatatataaca

SEQ ID NO: 14575 - RNA, 50 nt, synthetic construct
  source 1..50: mol_type = other RNA
ttagctggatgcctaaaataagtacgacctaaagacaaaaaaaaatatct

SEQ ID NO: 14576 - RNA, 50 nt, synthetic construct
  source 1..50: mol_type = other RNA
acataaatatacggcaaaattcgatagattgcattcctacggaataaagc

SEQ ID NO: 14577 - RNA, 50 nt, synthetic construct
  source 1..50: mol_type = other RNA
cgtaaagtacgtagccgacctaaatagaaataatactgcgataaaaaaat

SEQ ID NO: 14578 - RNA, 50 nt, synthetic construct
  source 1..50: mol_type = other RNA
gcatatcgaagactaaaatagccgtgagaacaggaatataaaatattaag

SEQ ID NO: 14579 - RNA, 50 nt, synthetic construct
  source 1..50: mol_type = other RNA
gatttacaaatagaatattatatcccaacggaggaatatctgtaaatacc

SEQ ID NO: 14580 - RNA, 50 nt, synthetic construct
  source 1..50: mol_type = other RNA
ttaattaatgataacatagctgaaaaagatatctattggcaaaataaacg

SEQ ID NO: 14581 - RNA, 50 nt, synthetic construct
  source 1..50: mol_type = other RNA
tattttaattactagagaagtgtttacatatacgtccataaataaaggga

SEQ ID NO: 14582 - RNA, 50 nt, synthetic construct
  source 1..50: mol_type = other RNA
cattttggatgcttaaaataagtgcgacctgaagagaaaaataaatatca

SEQ ID NO: 14583 - RNA, 50 nt, synthetic construct
  source 1..50: mol_type = other RNA
gcatttcgacgacgaaaataactctgagagaagaatatactgaataagaa

SEQ ID NO: 14584 - RNA, 50 nt, synthetic construct
  source 1..50: mol_type = other RNA
gtagctggatgcctaaaataagtccgacccgaagacaaaaataaatatca

SEQ ID NO: 14585 - RNA, 50 nt, synthetic construct
  source 1..50: mol_type = other RNA
cataacggttgatgtttaaaaatatacccggagggataacaaaaaatacc

SEQ ID NO: 14586 - RNA, 50 nt, synthetic construct
  source 1..50: mol_type = other RNA
tcggacggctgatatttaaatatatacccggagggataacaataaatacc

SEQ ID NO: 14587 - RNA, 50 nt, synthetic construct
  source 1..50: mol_type = other RNA
catttccgtcgatatttaaaaatcaattcagaggaatatctataaatacc

SEQ ID NO: 14588 - RNA, 50 nt, synthetic construct
  source 1..50: mol_type = other RNA
acacactaaatatagatatgctcatagaatgaagacacaaataaatttgt

SEQ ID NO: 14589 - RNA, 50 nt, synthetic construct
  source 1..50: mol_type = other RNA
atcataaaaatacttaaatgatcctatatatactatctaacttattggtt

SEQ ID NO: 14590 - RNA, 50 nt, synthetic construct
  source 1..50: mol_type = other RNA
ttaactggatgcctaaaataagtccgacctggagacaaaaataaatatca

SEQ ID NO: 14591 - RNA, 50 nt, synthetic construct
  source 1..50: mol_type = other RNA
cttatataatattgccctgtccctgaggaaaatgtgtgaaaaaataagat

SEQ ID NO: 14592 - RNA, 50 nt, synthetic construct
  source 1..50: mol_type = other RNA
ccggacttagggtacccttggaaatagaaataatactacaaaaaataaac

SEQ ID NO: 14593 - RNA, 50 nt, synthetic construct
  source 1..50: mol_type = other RNA
caggacgtatggtacctttggaaatagaaataatactacaaaaaataaac

SEQ ID NO: 14594 - RNA, 50 nt, synthetic construct
  source 1..50: mol_type = other RNA
cttgacatatatatgccgcaagcatagaaataggaatatctataattacc

SEQ ID NO: 14595 - RNA, 50 nt, synthetic construct
  source 1..50: mol_type = other RNA
gtcagacatttctatttaaaaatcaataataccatgtggaataaaaagac

SEQ ID NO: 14596 - RNA, 50 nt, synthetic construct
  source 1..50: mol_type = other RNA
acatcggaagagtgtgaggtttgaagatacactaaatataaataaaaacc

SEQ ID NO: 14597 - RNA, 50 nt, synthetic construct
  source 1..50: mol_type = other RNA
atatgttagatcctataataagtgcgacctgaagacaaaaattaaatacg

SEQ ID NO: 14598 - RNA, 50 nt, synthetic construct
  source 1..50: mol_type = other RNA
ggtatataatattgcccagtcccttagtaatatgtgtgaaaaaataagat

SEQ ID NO: 14599 - RNA, 50 nt, synthetic construct
  source 1..50: mol_type = other RNA
ccgtctagaatactaatattccggcagaagagattgaaaataaattcatc

SEQ ID NO: 14600 - RNA, 50 nt, synthetic construct
  source 1..50: mol_type = other RNA
ttagcgggatgcctaaaataagtccgtcctgaagacaaaaaaaaatatct

SEQ ID NO: 14601 - RNA, 50 nt, synthetic construct
  source 1..50: mol_type = other RNA
ttaatacatcataacattgctgaaaaagatatcaattggcaaaaaaaacg

SEQ ID NO: 14602 - RNA, 50 nt, synthetic construct
  source 1..50: mol_type = other RNA
ctacacctatgatacctttgaagatagaaataatactccaaaaaataaac

SEQ ID NO: 14603 - RNA, 50 nt, synthetic construct
  source 1..50: mol_type = other RNA
ttccacgaaatatagatttactaatagaaatattaatgctacgacgatga

SEQ ID NO: 14604 - RNA, 50 nt, synthetic construct
  source 1..50: mol_type = other RNA
gattttcgaagcctactttggaaatagaaattatactacataaaataaac

SEQ ID NO: 14605 - RNA, 50 nt, synthetic construct
  source 1..50: mol_type = other RNA
cataacggtagatgtttaaaaatatacccaaagtgataacaaaaaatacg

SEQ ID NO: 14606 - RNA, 50 nt, synthetic construct
  source 1..50: mol_type = other RNA
cttatataatattgccgaatacaaaatcgtactcgaatataaacacagaa

SEQ ID NO: 14607 - RNA, 50 nt, synthetic construct
  source 1..50: mol_type = other RNA
cctataaaatattagaccagggagaaagttgattgacgaaaaaaaatcga

SEQ ID NO: 14608 - RNA, 50 nt, synthetic construct
  source 1..50: mol_type = other RNA
gtgccatatataaagaagattccctgcaaataataaacttttgggagacg

SEQ ID NO: 14609 - RNA, 50 nt, synthetic construct
  source 1..50: mol_type = other RNA
gatttaaaaacaagataacataagtatacggaggaatatctataattaag

SEQ ID NO: 14610 - RNA, 50 nt, synthetic construct
  source 1..50: mol_type = other RNA
ggataactaatactcatatcttacttaaagagatttatactataataacc

SEQ ID NO: 14611 - RNA, 50 nt, synthetic construct
  source 1..50: mol_type = other RNA
ggataactaatactcatatctttccgaactgaagtatatataatattaag

SEQ ID NO: 14612 - RNA, 50 nt, synthetic construct
  source 1..50: mol_type = other RNA
ccatcgagaatactagaattgcggcagaatagatactacaaaaataaagc

SEQ ID NO: 14613 - RNA, 50 nt, synthetic construct
  source 1..50: mol_type = other RNA
gatttacaatataagctacgttgcgagaaataattattgttacaaaaaag

SEQ ID NO: 14614 - RNA, 50 nt, synthetic construct
  source 1..50: mol_type = other RNA
gttaactatattcccaaaatcttatagatataggaatatcaagaaatacc

SEQ ID NO: 14615 - RNA, 50 nt, synthetic construct
  source 1..50: mol_type = other RNA
cacaacctatgtttccgtgggacatagaaataatactacaaaaaataaaa

SEQ ID NO: 14616 - RNA, 50 nt, synthetic construct
  source 1..50: mol_type = other RNA
cccaccctatgttaccgtttgacatagaaataatactacaaaaaataaga

SEQ ID NO: 14617 - RNA, 50 nt, synthetic construct
  source 1..50: mol_type = other RNA
catcaacactgtgacctgtggagagagaaataatactacaaaaaataaag

SEQ ID NO: 14618 - RNA, 50 nt, synthetic construct
  source 1..50: mol_type = other RNA
gatttacaatataagctgcgttgcgaaaaataatgataacgataaatacg

SEQ ID NO: 14619 - RNA, 50 nt, synthetic construct
  source 1..50: mol_type = other RNA
gatttaaaaaaaagaaaacataagtcaagcgagactaccaaaaatttaag

SEQ ID NO: 14620 - RNA, 50 nt, synthetic construct
  source 1..50: mol_type = other RNA
catagacatagaactaagatactcaggaaatagtactacaaaaaataagc

SEQ ID NO: 14621 - RNA, 50 nt, synthetic construct
  source 1..50: mol_type = other RNA
aattacgtatgttaccgtccatcgtagaaataatactgcaaaaaaataat

SEQ ID NO: 14622 - RNA, 50 nt, synthetic construct
  source 1..50: mol_type = other RNA
gcagttcgaggacgaaaataaggcagagagaagaatatactgaataagac

SEQ ID NO: 14623 - RNA, 50 nt, synthetic construct
  source 1..50: mol_type = other RNA
ttgtcgggtatactaaaatcgcgagaataaagaataatactgaataagaa

SEQ ID NO: 14624 - RNA, 50 nt, synthetic construct
  source 1..50: mol_type = other RNA
gcgtttcgaagactaaaattaagttactaatttcattacaaaaaataaat

SEQ ID NO: 14625 - RNA, 50 nt, synthetic construct
  source 1..50: mol_type = other RNA
gcatttcgaggacgaaaataagtctgagagaagaattaacaataaatacc

SEQ ID NO: 14626 - RNA, 50 nt, synthetic construct
  source 1..50: mol_type = other RNA
aagaactattgttatttaaaaatatagccggagggataacaataaatacg

SEQ ID NO: 14627 - RNA, 50 nt, synthetic construct
  source 1..50: mol_type = other RNA
ggcagataaatactaaaagacatctagatatacataagaactaaatgcga

SEQ ID NO: 14628 - RNA, 50 nt, synthetic construct
  source 1..50: mol_type = other RNA
gtcagataaatactaaaaaacacctagatatacataagaagtaaatgcga

SEQ ID NO: 14629 - RNA, 50 nt, synthetic construct
  source 1..50: mol_type = other RNA
aactctggatgcctaaaataaggccgccctgatgacaaaaaaaaatatct

SEQ ID NO: 14630 - RNA, 50 nt, synthetic construct
  source 1..50: mol_type = other RNA
aataacgcttgttatttaaaaatatacccggcgtgttaacaataaatacg

SEQ ID NO: 14631 - RNA, 50 nt, synthetic construct
  source 1..50: mol_type = other RNA
gcgttacgaagactgaaataaccccgagagaagagtataaataaatatca

SEQ ID NO: 14632 - RNA, 50 nt, synthetic construct
  source 1..50: mol_type = other RNA
tactgggattacaggaagataagttactaatttaattgaataaaatatat

SEQ ID NO: 14633 - RNA, 50 nt, synthetic construct
  source 1..50: mol_type = other RNA
aagaactgtagttatttaaaaatatacccgcagggataacaataaatacg

SEQ ID NO: 14634 - RNA, 50 nt, synthetic construct
  source 1..50: mol_type = other RNA
gactctggaatactaaaattgccagaatatataattatactaaccttaat

SEQ ID NO: 14635 - RNA, 50 nt, synthetic construct
  source 1..50: mol_type = other RNA
gcatttcgaggacgaaaataagtctgagagaagaattaacaataaatacg

SEQ ID NO: 14636 - RNA, 50 nt, synthetic construct
  source 1..50: mol_type = other RNA
aaatgaaagatccccaaaatcttatagaaataggaatatcaataaatacc

SEQ ID NO: 14637 - RNA, 50 nt, synthetic construct
  source 1..50: mol_type = other RNA
gcatttcgtagactaaataaagtccgacctgaagacaaataaaaatatct

SEQ ID NO: 14638 - RNA, 50 nt, synthetic construct
  source 1..50: mol_type = other RNA
ttatgattgatgtaatattaaatctcaccggaggaatatcaataaatacg

SEQ ID NO: 14639 - RNA, 50 nt, synthetic construct
  source 1..50: mol_type = other RNA
ggatatcttaaactaatatctttgtgaaatagatttatacaataattaat

SEQ ID NO: 14640 - RNA, 50 nt, synthetic construct
  source 1..50: mol_type = other RNA
ctggacctatgatatctactgagatagaaataatactacaataaataagc

SEQ ID NO: 14641 - RNA, 50 nt, synthetic construct
  source 1..50: mol_type = other RNA
atcatataaatactaaacaagaaaagatcataattttgacaccttatacc

SEQ ID NO: 14642 - RNA, 50 nt, synthetic construct
  source 1..50: mol_type = other RNA
aaaaaatcagttgacgcgacaagacgaaatatcgtgaggaaaaataaaac

SEQ ID NO: 14643 - RNA, 50 nt, synthetic construct
  source 1..50: mol_type = other RNA
aaatgattgatactcaaattaaacaatacggaggaatatcaaaaaatacg

SEQ ID NO: 14644 - RNA, 50 nt, synthetic construct
  source 1..50: mol_type = other RNA
atggagcagtgtaaccttgggacatagaaataatactacaaaataaaaaa

SEQ ID NO: 14645 - RNA, 50 nt, synthetic construct
  source 1..50: mol_type = other RNA
cttatataatattgccgtgtgccctagtaaaatgtgtgaaaaaataagat

SEQ ID NO: 14646 - RNA, 50 nt, synthetic construct
  source 1..50: mol_type = other RNA
gatttggattgacatttaaaaatatacccggagtgttaacgataaatacg

SEQ ID NO: 14647 - RNA, 50 nt, synthetic construct
  source 1..50: mol_type = other RNA
cttatataatattgccgagtgcctaagtaaaatgtctgaaaaaataaacg

SEQ ID NO: 14648 - RNA, 50 nt, synthetic construct
  source 1..50: mol_type = other RNA
gtatcgggatattactaccggaattactaatttaattaataaaaatcaaa

SEQ ID NO: 14649 - RNA, 50 nt, synthetic construct
  source 1..50: mol_type = other RNA
cctaacctatgtttccgttggacatagaaataatactacaaaaaataaaa

SEQ ID NO: 14650 - RNA, 50 nt, synthetic construct
  source 1..50: mol_type = other RNA
cgccctaaataattatatatccgaatattacaatttatggtggatagata

SEQ ID NO: 14651 - RNA, 50 nt, synthetic construct
  source 1..50: mol_type = other RNA
ataaattgatggccagcaaataaaacggaattaaataaaattcacaagac

SEQ ID NO: 14652 - RNA, 50 nt, synthetic construct
  source 1..50: mol_type = other RNA
caataaattcaaataaaaaagactcagcacaacttagctaattttaaaaa

SEQ ID NO: 14653 - RNA, 50 nt, synthetic construct
  source 1..50: mol_type = other RNA
cgataaaatcaaataaaaaagacccggcataagttcacatattttaggtt

SEQ ID NO: 14654 - RNA, 50 nt, synthetic construct
  source 1..50: mol_type = other RNA
tataatatatttcgtaaatacttacacataagaactggggaccataaata

SEQ ID NO: 14655 - RNA, 50 nt, synthetic construct
  source 1..50: mol_type = other RNA
aaatataggcaaataaaaaagatccctgatacataagaatcggctcgtgt

SEQ ID NO: 14656 - RNA, 50 nt, synthetic construct
  source 1..50: mol_type = other RNA
aatcaaagtcataatgaagaataagatgacatatacatacttaatctgct

SEQ ID NO: 14657 - RNA, 50 nt, synthetic construct
  source 1..50: mol_type = other RNA
tgataccatgcaataaaaatttaataaataattaggagaagggacgcgtt

SEQ ID NO: 14658 - RNA, 50 nt, synthetic construct
  source 1..50: mol_type = other RNA
cacaccagtgcgataaaaatttaataaatataaaggagatcggatgcgtt

SEQ ID NO: 14659 - RNA, 50 nt, synthetic construct
  source 1..50: mol_type = other RNA
gagccccatgcaaaaaaattagaaaatgttatataaatacctgatccact

SEQ ID NO: 14660 - RNA, 50 nt, synthetic construct
  source 1..50: mol_type = other RNA
gaatattgcataataaaattggaaaaaacatattccatgagacaagacgg

SEQ ID NO: 14661 - RNA, 50 nt, synthetic construct
  source 1..50: mol_type = other RNA
tcgataggcatatacaataaatatatagctgcgggcttgcaattaattct

SEQ ID NO: 14662 - RNA, 50 nt, synthetic construct
  source 1..50: mol_type = other RNA
aactacaacttataaataaatgaaacataacaaagcttccaaataagata

SEQ ID NO: 14663 - RNA, 50 nt, synthetic construct
  source 1..50: mol_type = other RNA
aataagattggacaaaaatcatgtcaaataatatataccaagttccaatt

SEQ ID NO: 14664 - RNA, 50 nt, synthetic construct
  source 1..50: mol_type = other RNA
gtaaatttcgcaaaaagattagaaaatgttatataaatacttgatccacc

SEQ ID NO: 14665 - RNA, 50 nt, synthetic construct
  source 1..50: mol_type = other RNA
gagcctcaagcaaaaaaattagaacatgttatataaatacttgatccact

SEQ ID NO: 14666 - RNA, 50 nt, synthetic construct
  source 1..50: mol_type = other RNA
gaataccgcatattataaaattaatgtcacaaaataaccaattattcaca

SEQ ID NO: 14667 - RNA, 50 nt, synthetic construct
  source 1..50: mol_type = other RNA
gagagccatgcaataaaaatttaataaataaaaaggagaagggacgcggt

SEQ ID NO: 14668 - RNA, 50 nt, synthetic construct
  source 1..50: mol_type = other RNA
taccgaaataaaataaaaaagattcttttggagtagaatatgttggtata

SEQ ID NO: 14669 - RNA, 50 nt, synthetic construct
  source 1..50: mol_type = other RNA
gacccccttgcaaaaaaattagaaaatgttatataaatacttgatccact

SEQ ID NO: 14670 - RNA, 50 nt, synthetic construct
  source 1..50: mol_type = other RNA
tgctagaaattatctgagaaataaaacactaataacataaaattccctgt

SEQ ID NO: 14671 - RNA, 50 nt, synthetic construct
  source 1..50: mol_type = other RNA
tcgatagtgttgtataaagaagaaaacattaataaaatacctacgagtaa

SEQ ID NO: 14672 - RNA, 50 nt, synthetic construct
  source 1..50: mol_type = other RNA
gtcacacgtgcaataaaaatttaataaatataaaggagagtggacgcgta

SEQ ID NO: 14673 - RNA, 50 nt, synthetic construct
  source 1..50: mol_type = other RNA
gggagccatgcaataaaaatatactaaaaaaaaaggagaagggacgcggc

SEQ ID NO: 14674 - RNA, 50 nt, synthetic construct
  source 1..50: mol_type = other RNA
gacggccaagcaataaaaatttaataaaaaaaaaggagatgggacgcgca

SEQ ID NO: 14675 - RNA, 50 nt, synthetic construct
  source 1..50: mol_type = other RNA
gacggccaggcaataaaaatttaataaaaaaaaaggagaagggacgcgtg

SEQ ID NO: 14676 - RNA, 50 nt, synthetic construct
  source 1..50: mol_type = other RNA
gcatacatacaaataataaagatcccttcacgataaataagagccttatg

SEQ ID NO: 14677 - RNA, 50 nt, synthetic construct
  source 1..50: mol_type = other RNA
tataatgaattacttaaaaaataaatagcagcccgtttgaataacctaca

SEQ ID NO: 14678 - RNA, 50 nt, synthetic construct
  source 1..50: mol_type = other RNA
cataaaggaatattgatccagagtgtcttcccaaaaatattacataaata

SEQ ID NO: 14679 - RNA, 50 nt, synthetic construct
  source 1..50: mol_type = other RNA
gagagccatatgagaaaaatttaataaatataaaggagatggaacgcgtt

SEQ ID NO: 14680 - RNA, 50 nt, synthetic construct
  source 1..50: mol_type = other RNA
aattgcgttgtaataaaaatttaataaataaaaaggagaagggacgcggt

SEQ ID NO: 14681 - RNA, 50 nt, synthetic construct
  source 1..50: mol_type = other RNA
gaccgagatgcaataaaatatatttttatataaagaaagctgtactacat

SEQ ID NO: 14682 - RNA, 50 nt, synthetic construct
  source 1..50: mol_type = other RNA
ctattgctataaaataataaatatcaaacacaaaattggtgcggtagata

SEQ ID NO: 14683 - RNA, 50 nt, synthetic construct
  source 1..50: mol_type = other RNA
gaccgagatgcaataaaaatttaataaaaaaaaaggagaagggacgcgtt

SEQ ID NO: 14684 - RNA, 50 nt, synthetic construct
  source 1..50: mol_type = other RNA
gacggcctggcaataaaaatttaatataaaaaaaggagatgggacgcgca

SEQ ID NO: 14685 - RNA, 50 nt, synthetic construct
  source 1..50: mol_type = other RNA
tcctcttatacaatgaaaatttattatatataaataaagctgtactcccg

SEQ ID NO: 14686 - RNA, 50 nt, synthetic construct
  source 1..50: mol_type = other RNA
cgttaccgcataatataaaattaataaaagagaaggagaagggactcccg

SEQ ID NO: 14687 - RNA, 50 nt, synthetic construct
  source 1..50: mol_type = other RNA
aatacgtcataaaatggtcgataaacatgatgataaataagattgaaaac

SEQ ID NO: 14688 - RNA, 50 nt, synthetic construct
  source 1..50: mol_type = other RNA
cagtagcgataaaataatatatgacaaatacactcacccgcaagactatt

SEQ ID NO: 14689 - RNA, 50 nt, synthetic construct
  source 1..50: mol_type = other RNA
cacacctatgctataaaaatttaataaatataaagtaaatgggacgcggt

SEQ ID NO: 14690 - RNA, 50 nt, synthetic construct
  source 1..50: mol_type = other RNA
gacggccaggcaataaaaatttaataaaaaaaaaggagatgggatgcgtc

SEQ ID NO: 14691 - RNA, 50 nt, synthetic construct
  source 1..50: mol_type = other RNA
cagagccatgcaataaaaatttaataaaaaaaaaggagaagggatgcgtt

SEQ ID NO: 14692 - RNA, 50 nt, synthetic construct
  source 1..50: mol_type = other RNA
tggtaccatgcaataaaaatttaataaataataagtagaagggacgcgca

SEQ ID NO: 14693 - RNA, 50 nt, synthetic construct
  source 1..50: mol_type = other RNA
taccgaaataagaaataaatatatagagcggtggggaatatgttggtcta

SEQ ID NO: 14694 - RNA, 50 nt, synthetic construct
  source 1..50: mol_type = other RNA
tacggacaggcaataaaaatatactaaataaaaaggagatggggcgcgta

SEQ ID NO: 14695 - RNA, 50 nt, synthetic construct
  source 1..50: mol_type = other RNA
aacgtcgacgcaataataatttaataaaaaaaaagtataaggcacagtcg

SEQ ID NO: 14696 - RNA, 50 nt, synthetic construct
  source 1..50: mol_type = other RNA
aacggccgggcaataaaaatttaataaataaaaaggagatgggatgcgtt

SEQ ID NO: 14697 - RNA, 50 nt, synthetic construct
  source 1..50: mol_type = other RNA
aatcggaagagtgaaacataagatatatataatattatggctccactgat

SEQ ID NO: 14698 - RNA, 50 nt, synthetic construct
  source 1..50: mol_type = other RNA
gacagacaagcgaaaaaaatttaataaaaaaaaaggagatcgaacgcgaa

SEQ ID NO: 14699 - RNA, 50 nt, synthetic construct
  source 1..50: mol_type = other RNA
tggtaccatgcaataaaaatttaataaataataaggagaagggacgcggt

SEQ ID NO: 14700 - RNA, 50 nt, synthetic construct
  source 1..50: mol_type = other RNA
gaaaataaacttaataatatatgtcaaatacagacaccggaaagcagatt

SEQ ID NO: 14701 - RNA, 50 nt, synthetic construct
  source 1..50: mol_type = other RNA
ctaccgtatataatacaaaaatatatagctgatggcttgcaattactttt

SEQ ID NO: 14702 - RNA, 50 nt, synthetic construct
  source 1..50: mol_type = other RNA
tgcccccgtgcaaaacaattagatatatcatatatatattaattccgtgt

SEQ ID NO: 14703 - RNA, 50 nt, synthetic construct
  source 1..50: mol_type = other RNA
gcatcgtaccacgcgaaatataaaacataacgataaataagaattcagac

SEQ ID NO: 14704 - RNA, 50 nt, synthetic construct
  source 1..50: mol_type = other RNA
aataaaggaatattgatccgaagtgtctacctaaaaaaattacataaata

SEQ ID NO: 14705 - RNA, 50 nt, synthetic construct
  source 1..50: mol_type = other RNA
attaatgttacacaaaaataatgtcaaataatattataggcttcacagcg

SEQ ID NO: 14706 - RNA, 50 nt, synthetic construct
  source 1..50: mol_type = other RNA
ggtaaagcaataatgaaaatttaataaatataaaggagatggaacgcctc

SEQ ID NO: 14707 - RNA, 50 nt, synthetic construct
  source 1..50: mol_type = other RNA
tgtatagcaataatgaaaatttaataaaaaaaaaggagaagggacggggt

SEQ ID NO: 14708 - RNA, 50 nt, synthetic construct
  source 1..50: mol_type = other RNA
ccttaccatgcaataaaaatttaataaataataaggagaagggacggctt

SEQ ID NO: 14709 - RNA, 50 nt, synthetic construct
  source 1..50: mol_type = other RNA
tgtatatagaaatagtttggtttccacgacagataaatattacatatagc

SEQ ID NO: 14710 - RNA, 50 nt, synthetic construct
  source 1..50: mol_type = other RNA
gacacacatgcaataaaaatttaataaataaaaaggagaagggatgcgtc

SEQ ID NO: 14711 - RNA, 50 nt, synthetic construct
  source 1..50: mol_type = other RNA
ggcggcgatgtgataaaaatttaataaatataaaggagatggaccgcagt

SEQ ID NO: 14712 - RNA, 50 nt, synthetic construct
  source 1..50: mol_type = other RNA
aataagaaattaagaaattaatctcaaatatcagcaattacagttccaag

SEQ ID NO: 14713 - RNA, 50 nt, synthetic construct
  source 1..50: mol_type = other RNA
aataagaaattatttattacatttgatatataaattaagctgtaccgcga

SEQ ID NO: 14714 - RNA, 50 nt, synthetic construct
  source 1..50: mol_type = other RNA
tgttagaaattaaacataaattcatagataaatattggatcgtgcacagc

SEQ ID NO: 14715 - RNA, 50 nt, synthetic construct
  source 1..50: mol_type = other RNA
ggtaagagattagacataaattcaaagataaatatttgaaagtactgctt

SEQ ID NO: 14716 - RNA, 50 nt, synthetic construct
  source 1..50: mol_type = other RNA
tggtaccatgcaataaaaatttaataataaataaggagaagggacgcggt

SEQ ID NO: 14717 - RNA, 50 nt, synthetic construct
  source 1..50: mol_type = other RNA
gaaaaaactaatattgacgtagacgataccgtgtaaatattttacataat

SEQ ID NO: 14718 - RNA, 50 nt, synthetic construct
  source 1..50: mol_type = other RNA
ttgaatgttgcaaaacaattagtaaaaacataatccataaaatacaagta

SEQ ID NO: 14719 - RNA, 50 nt, synthetic construct
  source 1..50: mol_type = other RNA
ccctcgttgattagcaaaaatttataatattataatctacgatataacta

SEQ ID NO: 14720 - RNA, 50 nt, synthetic construct
  source 1..50: mol_type = other RNA
aaaaacattcaaataaaaaacttctgttacacaaaaattcgtccaaaatt

SEQ ID NO: 14721 - RNA, 50 nt, synthetic construct
  source 1..50: mol_type = other RNA
tataaaattaataatgacgcgtcaacatgatgataaataagcattcagat

SEQ ID NO: 14722 - RNA, 50 nt, synthetic construct
  source 1..50: mol_type = other RNA
taaagccagtcattaaaaatttaataagaatattgaagacataagtttag

SEQ ID NO: 14723 - RNA, 50 nt, synthetic construct
  source 1..50: mol_type = other RNA
tggaaccgcataataaaaaaatatatagctgctgtctccgaattactatg

SEQ ID NO: 14724 - RNA, 50 nt, synthetic construct
  source 1..50: mol_type = other RNA
tggttcaatgcaataaaaatttaataaataataaggagaagggacctgac

SEQ ID NO: 14725 - RNA, 50 nt, synthetic construct
  source 1..50: mol_type = other RNA
actgaagaaaaaatatatatgcgtatagctatttaactagttatactgat

SEQ ID NO: 14726 - RNA, 50 nt, synthetic construct
  source 1..50: mol_type = other RNA
actaatgttacaaatatgaaattttatataaaattcattctcgggaaaca

SEQ ID NO: 14727 - RNA, 50 nt, synthetic construct
  source 1..50: mol_type = other RNA
taaagccattcattaaaaatttaatataaaaaaaggagaagggacgcccc

SEQ ID NO: 14728 - RNA, 50 nt, synthetic construct
  source 1..50: mol_type = other RNA
gagagcgacgcaataaaaatatactaaaaaaaaaggagatgggacgcgta

SEQ ID NO: 14729 - RNA, 50 nt, synthetic construct
  source 1..50: mol_type = other RNA
gacggacaggcaataaaaatatactaaaaaaaaaggagatggaatgcgtt

SEQ ID NO: 14730 - RNA, 50 nt, synthetic construct
  source 1..50: mol_type = other RNA
agtaaagcaataatgaaaatttaataaataaaaaggagaaaggacgcgtc

SEQ ID NO: 14731 - RNA, 50 nt, synthetic construct
  source 1..50: mol_type = other RNA
gacaaacaagcaataaaattttaataaaaaaaaaggagaagtgatgcgtt

SEQ ID NO: 14732 - RNA, 50 nt, synthetic construct
  source 1..50: mol_type = other RNA
gtcagccaggcaatataaatttaataaaaaaaaaggagatggaatgctat

SEQ ID NO: 14733 - RNA, 50 nt, synthetic construct
  source 1..50: mol_type = other RNA
taaatccattcattaaaaatgtaatataaaaaaaggagaaggaacgcgtt

SEQ ID NO: 14734 - RNA, 50 nt, synthetic construct
  source 1..50: mol_type = other RNA
aacactaaattatcaaaaatttaattaaaaataagcagaaaggacgcctc

SEQ ID NO: 14735 - RNA, 50 nt, synthetic construct
  source 1..50: mol_type = other RNA
tggagacttgcaataataatttaatataaaaaaaggagaagtgacgcaca

SEQ ID NO: 14736 - RNA, 50 nt, synthetic construct
  source 1..50: mol_type = other RNA
gcatcgtaccttgcaaaatataaaacatcacgataaataagaattcagac

SEQ ID NO: 14737 - RNA, 50 nt, synthetic construct
  source 1..50: mol_type = other RNA
gatgattgtcaaaaaattattgtataaataaatattgcaggagactgccc

SEQ ID NO: 14738 - RNA, 50 nt, synthetic construct
  source 1..50: mol_type = other RNA
cagagccatgcaataaaaacataaaaaaataaaaggagaagggacgcatg

SEQ ID NO: 14739 - RNA, 50 nt, synthetic construct
  source 1..50: mol_type = other RNA
caataatgtcaaataattattatacccgacatataagattcggctcgtgt

SEQ ID NO: 14740 - RNA, 50 nt, synthetic construct
  source 1..50: mol_type = other RNA
gacatccaggcaataaaattttaatataaaaaaacgaccacggactcgtt

SEQ ID NO: 14741 - RNA, 50 nt, synthetic construct
  source 1..50: mol_type = other RNA
aaaggccgggcaataaaatattttgatataatatatagtcttagatcttt

SEQ ID NO: 14742 - RNA, 50 nt, synthetic construct
  source 1..50: mol_type = other RNA
tcctctttaattgtcgaatattattatatataaataaagcagtactgatt

SEQ ID NO: 14743 - RNA, 50 nt, synthetic construct
  source 1..50: mol_type = other RNA
ttaagccattcattaaaaatttaataaatataaaggagaaggtcctcgtt

SEQ ID NO: 14744 - RNA, 50 nt, synthetic construct
  source 1..50: mol_type = other RNA
catttgcaataaaattagatattttatataaaattcattcttcactggat

SEQ ID NO: 14745 - RNA, 50 nt, synthetic construct
  source 1..50: mol_type = other RNA
cgcaccgatgtgataaaaatttaataaatataaaggagatgggacgcgag

SEQ ID NO: 14746 - RNA, 50 nt, synthetic construct
  source 1..50: mol_type = other RNA
attcgggagagtgaaacataagatataaataatattatggctccacagat

SEQ ID NO: 14747 - RNA, 50 nt, synthetic construct
  source 1..50: mol_type = other RNA
tacggccaggcaatataaatttaataaatatcaacaattacagttccaag

SEQ ID NO: 14748 - RNA, 50 nt, synthetic construct
  source 1..50: mol_type = other RNA
tatactatgccatatatcaagctgagaaatatattataattcgcaaatga

SEQ ID NO: 14749 - RNA, 50 nt, synthetic construct
  source 1..50: mol_type = other RNA
gacagccaggagataaaaatatactaaaaaaaaaggagatggtgcgcgta

SEQ ID NO: 14750 - RNA, 50 nt, synthetic construct
  source 1..50: mol_type = other RNA
gtaactttcttaataaaaaagatttgaatatcgaatctacaaaatacgtt

SEQ ID NO: 14751 - RNA, 50 nt, synthetic construct
  source 1..50: mol_type = other RNA
ttccgctatataataaaaaattaaagagccaccggttttaaattactgtg

SEQ ID NO: 14752 - RNA, 50 nt, synthetic construct
  source 1..50: mol_type = other RNA
cgcatagcaataatgaaaatataataaaaaacaaggagaaaggactcgtt

SEQ ID NO: 14753 - RNA, 50 nt, synthetic construct
  source 1..50: mol_type = other RNA
tacggccaggcaataaaaatatactaaaaaaaaaggagatggtgcgcgta

SEQ ID NO: 14754 - RNA, 50 nt, synthetic construct
  source 1..50: mol_type = other RNA
tatactcacttataaataaatgaatcataacatggcttccaaataagata

SEQ ID NO: 14755 - RNA, 50 nt, synthetic construct
  source 1..50: mol_type = other RNA
tagagccttgcaataataatttaataaaaaaaaaggagaagtgacgcgca

SEQ ID NO: 14756 - RNA, 50 nt, synthetic construct
  source 1..50: mol_type = other RNA
agtatagcaataatgaaaatttaataaataaaaaggagactggacccgcc

SEQ ID NO: 14757 - RNA, 50 nt, synthetic construct
  source 1..50: mol_type = other RNA
tgcactaatatatatagcggcttgggatataaattaatccgttaattcga

SEQ ID NO: 14758 - RNA, 50 nt, synthetic construct
  source 1..50: mol_type = other RNA
agttctaatacataaaaacataaaaattctggagactcgcgatatacatg

SEQ ID NO: 14759 - RNA, 50 nt, synthetic construct
  source 1..50: mol_type = other RNA
caagattactatccagaaatactggatgtatctaataaatacaattaggt

SEQ ID NO: 14760 - RNA, 50 nt, synthetic construct
  source 1..50: mol_type = other RNA
aggacaaatacataaaatagaaacgaacattttactcagtttatatacct

SEQ ID NO: 14761 - RNA, 50 nt, synthetic construct
  source 1..50: mol_type = other RNA
tggtcatatacataaaatagaaagtaacattttattgagtcaatatatct

SEQ ID NO: 14762 - RNA, 50 nt, synthetic construct
  source 1..50: mol_type = other RNA
atatgaattcataatatcactacattaccatatagattgaatataaaccc

SEQ ID NO: 14763 - RNA, 50 nt, synthetic construct
  source 1..50: mol_type = other RNA
aaataatgtctaacttaaaatataaaaattttttccgatttatgtcaacg

SEQ ID NO: 14764 - RNA, 50 nt, synthetic construct
  source 1..50: mol_type = other RNA
cgtattaatacataataaatcataaaacaattaagagagtctcgaacccg

SEQ ID NO: 14765 - RNA, 50 nt, synthetic construct
  source 1..50: mol_type = other RNA
cccattaatacataataaatcaaaaaacaattaagagagtcttgcaccct

SEQ ID NO: 14766 - RNA, 50 nt, synthetic construct
  source 1..50: mol_type = other RNA
atcacaaattcataaaaacaaattaaaaattaagcctcgcaatatacttg

SEQ ID NO: 14767 - RNA, 50 nt, synthetic construct
  source 1..50: mol_type = other RNA
gggttgttgatatggatatataagaagcatatttgagaatatatataact

SEQ ID NO: 14768 - RNA, 50 nt, synthetic construct
  source 1..50: mol_type = other RNA
tggtcaaataatattaatagaaaataacattttattgagtcttctctatt

SEQ ID NO: 14769 - RNA, 50 nt, synthetic construct
  source 1..50: mol_type = other RNA
ggaattaagataccaagacatagttcacgacatatatacaatataactac

SEQ ID NO: 14770 - RNA, 50 nt, synthetic construct
  source 1..50: mol_type = other RNA
tgatgtctaataaaataaatacttgaagtatctacataatccaatacctg

SEQ ID NO: 14771 - RNA, 50 nt, synthetic construct
  source 1..50: mol_type = other RNA
aaacatattatcctggtaaataccttaatataaatcataaaggtatatct

SEQ ID NO: 14772 - RNA, 50 nt, synthetic construct
  source 1..50: mol_type = other RNA
atatgtgtaataaaaaaaattataaaacaattatgagagtatcgaaccct

SEQ ID NO: 14773 - RNA, 50 nt, synthetic construct
  source 1..50: mol_type = other RNA
gactcattaataaatatattcttgtcgcatattactgagtccatatatct

SEQ ID NO: 14774 - RNA, 50 nt, synthetic construct
  source 1..50: mol_type = other RNA
acatatattcccttcgcgcccttcaaaattttaatcataaatataattct

SEQ ID NO: 14775 - RNA, 50 nt, synthetic construct
  source 1..50: mol_type = other RNA
gaatctttaataaaaatattcgtttggataattactgagtttatatatct

SEQ ID NO: 14776 - RNA, 50 nt, synthetic construct
  source 1..50: mol_type = other RNA
aatgaaaataaagaaatacatcattctcagcatgagaaaactataaatct

SEQ ID NO: 14777 - RNA, 50 nt, synthetic construct
  source 1..50: mol_type = other RNA
gacaaaaatacaaatgtctgaataaaaattttatgaaatctgagaaaggc

SEQ ID NO: 14778 - RNA, 50 nt, synthetic construct
  source 1..50: mol_type = other RNA
gaaacattaaaatatatattggtttcagtattaacataatccatttcatg

SEQ ID NO: 14779 - RNA, 50 nt, synthetic construct
  source 1..50: mol_type = other RNA
gcttgtgtaaaaaataaatgaaaaaaacctctaatccaatatactgcatg

SEQ ID NO: 14780 - RNA, 50 nt, synthetic construct
  source 1..50: mol_type = other RNA
cgtattaatacataataaatcataaaacaattaagagattcccgcccccg

SEQ ID NO: 14781 - RNA, 50 nt, synthetic construct
  source 1..50: mol_type = other RNA
tggtcatatacataaaatagaaagaaactttttacgtacaaaaatccgtt

SEQ ID NO: 14782 - RNA, 50 nt, synthetic construct
  source 1..50: mol_type = other RNA
gaatccctaaatctatatatacttatggataattgacgatatatataccg

SEQ ID NO: 14783 - RNA, 50 nt, synthetic construct
  source 1..50: mol_type = other RNA
aaaacaccgaatacgaagattagaggcaaatttatataatataattcctg

SEQ ID NO: 14784 - RNA, 50 nt, synthetic construct
  source 1..50: mol_type = other RNA
atataatgtctatcttaaaatataaaaattttatccgatttagttgacct

SEQ ID NO: 14785 - RNA, 50 nt, synthetic construct
  source 1..50: mol_type = other RNA
aggacgaatacatatgtaaaaatgaatcaattaaaactgtatatatagct

SEQ ID NO: 14786 - RNA, 50 nt, synthetic construct
  source 1..50: mol_type = other RNA
cggttggttatatgaatatatatgatgcatcattgacgatatatatacct

SEQ ID NO: 14787 - RNA, 50 nt, synthetic construct
  source 1..50: mol_type = other RNA
ttcgctaattcataaaaacatattagacaataaatcagatttttatatct

SEQ ID NO: 14788 - RNA, 50 nt, synthetic construct
  source 1..50: mol_type = other RNA
aaatttagagaagatagacatatctctgaccaagatacagaaataaatct

SEQ ID NO: 14789 - RNA, 50 nt, synthetic construct
  source 1..50: mol_type = other RNA
cagaaataaataggaaaaccatgaattattttagaactatctatatacca

SEQ ID NO: 14790 - RNA, 50 nt, synthetic construct
  source 1..50: mol_type = other RNA
ctggattacatttattcaatacagaaattttttaaaataattataacctg

SEQ ID NO: 14791 - RNA, 50 nt, synthetic construct
  source 1..50: mol_type = other RNA
gagcaataaataggaaagccaataattattttagaatcaagtaaatatct

SEQ ID NO: 14792 - RNA, 50 nt, synthetic construct
  source 1..50: mol_type = other RNA
cgttcgtccataagtatatataagaagcaagattgagaatatatatacct

SEQ ID NO: 14793 - RNA, 50 nt, synthetic construct
  source 1..50: mol_type = other RNA
atgatagcgaatacatagatcaactgcaaatttatataatataattcatg

SEQ ID NO: 14794 - RNA, 50 nt, synthetic construct
  source 1..50: mol_type = other RNA
ccggaaaatatagaaatacaatattccccagaggaatacgctatatacat

SEQ ID NO: 14795 - RNA, 50 nt, synthetic construct
  source 1..50: mol_type = other RNA
caagagaattactatagataaataagacgttttaactacaaatattcacc

SEQ ID NO: 14796 - RNA, 50 nt, synthetic construct
  source 1..50: mol_type = other RNA
actacacggaatacgaagattagaggcaaatttatataatataatttatg

SEQ ID NO: 14797 - RNA, 50 nt, synthetic construct
  source 1..50: mol_type = other RNA
gatgaaaatataaataaaaggagaacaacatcccaaattattagcacgtg

SEQ ID NO: 14798 - RNA, 50 nt, synthetic construct
  source 1..50: mol_type = other RNA
ctatattatacataaaaatgacaatagcataaaggactatatactccatc

SEQ ID NO: 14799 - RNA, 50 nt, synthetic construct
  source 1..50: mol_type = other RNA
gagtcattaataaatatattcttctcgctaattactgagtttatatatct

SEQ ID NO: 14800 - RNA, 50 nt, synthetic construct
  source 1..50: mol_type = other RNA
gcttatttgataggaaaatattagaagcagaatctagaatatatataccc

SEQ ID NO: 14801 - RNA, 50 nt, synthetic construct
  source 1..50: mol_type = other RNA
ggcttggctaaatggatatattttatagaaaattgacaatatatatacca

SEQ ID NO: 14802 - RNA, 50 nt, synthetic construct
  source 1..50: mol_type = other RNA
ccggttcataaactataaatatagtaacattttacgtacatatattcctg

SEQ ID NO: 14803 - RNA, 50 nt, synthetic construct
  source 1..50: mol_type = other RNA
agtgcgaaaatatgaatattttagaagcagaaaatccaaaagatatacat

SEQ ID NO: 14804 - RNA, 50 nt, synthetic construct
  source 1..50: mol_type = other RNA
cggttggatatatgaatatatctgaagctaaattgacgatataaattctt

SEQ ID NO: 14805 - RNA, 50 nt, synthetic construct
  source 1..50: mol_type = other RNA
gagtcattaataaatatattcttctcgctaattactcagtttacatataa

SEQ ID NO: 14806 - RNA, 50 nt, synthetic construct
  source 1..50: mol_type = other RNA
agtgcgaatacatgaatatattagaagcagaaaatccaaaagatatacat

SEQ ID NO: 14807 - RNA, 50 nt, synthetic construct
  source 1..50: mol_type = other RNA
catgaatatataaataaaaggacattcccatcccaaattattaggacgct

SEQ ID NO: 14808 - RNA, 50 nt, synthetic construct
  source 1..50: mol_type = other RNA
atataatgtctaagaatatattagaagcagaattgactatatttataccc

SEQ ID NO: 14809 - RNA, 50 nt, synthetic construct
  source 1..50: mol_type = other RNA
taatcattaacaaaataatgaaaaaaacctattactgagtcgatatatct

SEQ ID NO: 14810 - RNA, 50 nt, synthetic construct
  source 1..50: mol_type = other RNA
gatgaaaaaataaataaaaggagatcgacatcccaaattactaggacgcc

SEQ ID NO: 14811 - RNA, 50 nt, synthetic construct
  source 1..50: mol_type = other RNA
ctataaggtctaaagagaaaaatcaatcaattagaaaaatacaattaggg

SEQ ID NO: 14812 - RNA, 50 nt, synthetic construct
  source 1..50: mol_type = other RNA
cctgataattggtagagaataaatacttcattatctaaatacaattaggc

SEQ ID NO: 14813 - RNA, 50 nt, synthetic construct
  source 1..50: mol_type = other RNA
gcaacattaataaatatattcttttcgctaattactgagtccatatatca

SEQ ID NO: 14814 - RNA, 50 nt, synthetic construct
  source 1..50: mol_type = other RNA
agatgtgtaataaataaaatacttgaagtatctccctaatccaatatatg

SEQ ID NO: 14815 - RNA, 50 nt, synthetic construct
  source 1..50: mol_type = other RNA
gatgaatatataaataaaaggatatccagatcccaaattactagcacgct

SEQ ID NO: 14816 - RNA, 50 nt, synthetic construct
  source 1..50: mol_type = other RNA
cggttcttaagaaaaatatgttcgaagcaaaatgaaagatatatatacct

SEQ ID NO: 14817 - RNA, 50 nt, synthetic construct
  source 1..50: mol_type = other RNA
gatgaaaatataaataaaaggaaaccgacatcccaaattactatcacgcc

SEQ ID NO: 14818 - RNA, 50 nt, synthetic construct
  source 1..50: mol_type = other RNA
gagtcattaataaatatattcttctccctgattactgactctatatatct

SEQ ID NO: 14819 - RNA, 50 nt, synthetic construct
  source 1..50: mol_type = other RNA
ctgatccctatatgaaaatattaaccgaaaattataagatatatgtacct

SEQ ID NO: 14820 - RNA, 50 nt, synthetic construct
  source 1..50: mol_type = other RNA
ggcttggttaaacgaaaatattttatggataattgaagatatatatacct

SEQ ID NO: 14821 - RNA, 50 nt, synthetic construct
  source 1..50: mol_type = other RNA
agaagtgtaataaaaaaaatactggaaggatctacataattatgtccact

SEQ ID NO: 14822 - RNA, 50 nt, synthetic construct
  source 1..50: mol_type = other RNA
atctctaatatatgaaaatatttcagcaaatatgaaagagaaacgacaag

SEQ ID NO: 14823 - RNA, 50 nt, synthetic construct
  source 1..50: mol_type = other RNA
cggttggttatatgaaaatattagaagctaaattgaggatataaatacct

SEQ ID NO: 14824 - RNA, 50 nt, synthetic construct
  source 1..50: mol_type = other RNA
agatgtgtaataaataaaatacttgaagtatctacataatccaatacctc

SEQ ID NO: 14825 - RNA, 50 nt, synthetic construct
  source 1..50: mol_type = other RNA
gctgatttgatatgaatatattagaagcagaagtgactatatatatacct

SEQ ID NO: 14826 - RNA, 50 nt, synthetic construct
  source 1..50: mol_type = other RNA
gcaacattaataaatatattcttgtcgctacttactgaatttatatatga

SEQ ID NO: 14827 - RNA, 50 nt, synthetic construct
  source 1..50: mol_type = other RNA
gcttatttgatatgaataaattagatgcagaattgactatatatatacct

SEQ ID NO: 14828 - RNA, 50 nt, synthetic construct
  source 1..50: mol_type = other RNA
agtgctaagatatgaaaatactagaagcagaaaatcctatatatatacct

SEQ ID NO: 14829 - RNA, 50 nt, synthetic construct
  source 1..50: mol_type = other RNA
cggttgttaatacggatatataagaagcagaattgataatacatataccg

SEQ ID NO: 14830 - RNA, 50 nt, synthetic construct
  source 1..50: mol_type = other RNA
ggcttgtcgataaaataatccatatgaatattaatcaataaggtatatca

SEQ ID NO: 14831 - RNA, 50 nt, synthetic construct
  source 1..50: mol_type = other RNA
tgggataattggtagagaataaatacttgattatctaaatacaattaggg

SEQ ID NO: 14832 - RNA, 50 nt, synthetic construct
  source 1..50: mol_type = other RNA
gatgaatatataaataaagggagatcgacatctcaaattacgaggacgcc

SEQ ID NO: 14833 - RNA, 50 nt, synthetic construct
  source 1..50: mol_type = other RNA
aaccaactgatatcaatatattagaaccagaattgactataaatataccc

SEQ ID NO: 14834 - RNA, 50 nt, synthetic construct
  source 1..50: mol_type = other RNA
ataagtttaataaattagccaattaatcaatgaaactccatcataaataa

SEQ ID NO: 14835 - RNA, 50 nt, synthetic construct
  source 1..50: mol_type = other RNA
gggttgttaataccgatatataagaagcaaaattgagagtatatatatca

SEQ ID NO: 14836 - RNA, 50 nt, synthetic construct
  source 1..50: mol_type = other RNA
gaggcattaataaatatattctactccctaattactgaatccatataccg

SEQ ID NO: 14837 - RNA, 50 nt, synthetic construct
  source 1..50: mol_type = other RNA
gacgaaaattggtagagaataaatacgtcattagctaaatacaattaggg

SEQ ID NO: 14838 - RNA, 50 nt, synthetic construct
  source 1..50: mol_type = other RNA
aaatccttaagaaaaatatgaataatattgttatccaattgaaatccata

SEQ ID NO: 14839 - RNA, 50 nt, synthetic construct
  source 1..50: mol_type = other RNA
gggttggttaaatgaatatattttatcgatatttgactatatatatacct

SEQ ID NO: 14840 - RNA, 50 nt, synthetic construct
  source 1..50: mol_type = other RNA
cgtttgttgatatgaaaataatagaagcatatttgagtatatatataccg

SEQ ID NO: 14841 - RNA, 50 nt, synthetic construct
  source 1..50: mol_type = other RNA
gacaaatatatataaaaaaggaatcgcacatctcaaattattagcaggca

SEQ ID NO: 14842 - RNA, 50 nt, synthetic construct
  source 1..50: mol_type = other RNA
cgtttgttgatatgaaaatattagaagtatatttgagtatatataaatgt

SEQ ID NO: 14843 - RNA, 50 nt, synthetic construct
  source 1..50: mol_type = other RNA
tattcgtagatatgaaaatattagaagcggaataatgaatagaaatacat

SEQ ID NO: 14844 - RNA, 50 nt, synthetic construct
  source 1..50: mol_type = other RNA
ggcttggttaaacgaaaatattttatggataattgaagatatatataccg

SEQ ID NO: 14845 - RNA, 50 nt, synthetic construct
  source 1..50: mol_type = other RNA
cgttcgtccaaaggcacatataatacggaaaattgagaatatataaatta

SEQ ID NO: 14846 - RNA, 50 nt, synthetic construct
  source 1..50: mol_type = other RNA
ggcttggttaaatgaaaatattttatcgatatttgactatatatatacct

SEQ ID NO: 14847 - RNA, 50 nt, synthetic construct
  source 1..50: mol_type = other RNA
cggctcttaagaaaaatatgttcgaagcataaatgacgatatatatagcg

SEQ ID NO: 14848 - RNA, 50 nt, synthetic construct
  source 1..50: mol_type = other RNA
cggacgaatagataggttacgattaatcaatattgacgatataaataaca

SEQ ID NO: 14849 - RNA, 50 nt, synthetic construct
  source 1..50: mol_type = other RNA
gcttatttgatatgaaaatattagaagcagaatttactatatatattcct

SEQ ID NO: 14850 - RNA, 50 nt, synthetic construct
  source 1..50: mol_type = other RNA
cggtcgaatacataggtaaagatgaatcaatattgacaatatatatagcg

SEQ ID NO: 14851 - RNA, 50 nt, synthetic construct
  source 1..50: mol_type = other RNA
cgtttgttgagatgaaaatattagaagcatattcgagtatatatataccg

SEQ ID NO: 14852 - RNA, 50 nt, synthetic construct
  source 1..50: mol_type = other RNA
gggttggttaaatgaatatattttatcgatatttgactatatatataccg

SEQ ID NO: 14853 - RNA, 50 nt, synthetic construct
  source 1..50: mol_type = other RNA
acacaatcgagataaatatgttcgaagcataattgactatatatatacgt

SEQ ID NO: 14854 - RNA, 50 nt, synthetic construct
  source 1..50: mol_type = other RNA
gttgaaaatataaataaaaggatatccacatcgcaaattattaggaaggg

SEQ ID NO: 14855 - RNA, 50 nt, synthetic construct
  source 1..50: mol_type = other RNA
ctggataagataggtatagataagaatcaaaatcgcgaatatatataccg

SEQ ID NO: 14856 - RNA, 50 nt, synthetic construct
  source 1..50: mol_type = other RNA
gatgaatatataaaaaaaaggagatccacatctcacatcattagttaagg

SEQ ID NO: 14857 - RNA, 50 nt, synthetic construct
  source 1..50: mol_type = other RNA
acacagctgatatgaatatattagacccagaattgactataaatataacc

SEQ ID NO: 14858 - RNA, 50 nt, synthetic construct
  source 1..50: mol_type = other RNA
aagcaactgaaatgaaaatattagaacaagaagtgactataaatataccc

SEQ ID NO: 14859 - RNA, 50 nt, synthetic construct
  source 1..50: mol_type = other RNA
gcaacattaataaatatattcttgtcggtaattactgagtttatataact

SEQ ID NO: 14860 - RNA, 50 nt, synthetic construct
  source 1..50: mol_type = other RNA
agatgtgtaataaaaaaaatacttgaactatccacataatccatctcatg

SEQ ID NO: 14861 - RNA, 50 nt, synthetic construct
  source 1..50: mol_type = other RNA
aagaccagagaccatgaatataatattatctacaatcacataaaattaca

SEQ ID NO: 14862 - RNA, 50 nt, synthetic construct
  source 1..50: mol_type = other RNA
cccaaatatttcgcgtaaataaatatgttctgcgatcaatcatatatagg

SEQ ID NO: 14863 - RNA, 50 nt, synthetic construct
  source 1..50: mol_type = other RNA
agggggatcataatatataaattaagttgatacaaataaacagactagaa

SEQ ID NO: 14864 - RNA, 50 nt, synthetic construct
  source 1..50: mol_type = other RNA
acataatattgcgcgtaattaaaaaagatccgggattaatcaaatatgag

SEQ ID NO: 14865 - RNA, 50 nt, synthetic construct
  source 1..50: mol_type = other RNA
ttcagaatccgtaaatatgaattaattagtaacaaataatcaaaacaacg

SEQ ID NO: 14866 - RNA, 50 nt, synthetic construct
  source 1..50: mol_type = other RNA
ttcaaataatttttacgcattgaacaaaaattattcccattatataagac

SEQ ID NO: 14867 - RNA, 50 nt, synthetic construct
  source 1..50: mol_type = other RNA
ggagcgatgaaccaatataaataagttattaagaatataactattaaacg

SEQ ID NO: 14868 - RNA, 50 nt, synthetic construct
  source 1..50: mol_type = other RNA
gctaataccacaataataatcctgaattaaattaattctttaataagtta

SEQ ID NO: 14869 - RNA, 50 nt, synthetic construct
  source 1..50: mol_type = other RNA
tgtaagtgaggactatagaagataaatataaataatcaatcgacacgaat

SEQ ID NO: 14870 - RNA, 50 nt, synthetic construct
  source 1..50: mol_type = other RNA
caaattaagcaacaataatttaaaaatatctacacccacaaaaattagac

SEQ ID NO: 14871 - RNA, 50 nt, synthetic construct
  source 1..50: mol_type = other RNA
gtctggacatagatcaaaatatactctgtctgtccataataaaatccgca

SEQ ID NO: 14872 - RNA, 50 nt, synthetic construct
  source 1..50: mol_type = other RNA
acaaaaaaaatgatattatagattctgacgaataagattacggacataac

SEQ ID NO: 14873 - RNA, 50 nt, synthetic construct
  source 1..50: mol_type = other RNA
tatcggatctttaaaaattaattaattagaattaatacgaccaatatgaa

SEQ ID NO: 14874 - RNA, 50 nt, synthetic construct
  source 1..50: mol_type = other RNA
tcatggacatacatcaaaatatatactggctgtttataataaactgcggc

SEQ ID NO: 14875 - RNA, 50 nt, synthetic construct
  source 1..50: mol_type = other RNA
gttagataataaaatagaattgggaataaatgagctacttcgaataatag

SEQ ID NO: 14876 - RNA, 50 nt, synthetic construct
  source 1..50: mol_type = other RNA
tcggtgaaatctgtactaataaataataaattaaagtatcattgaaaatg

SEQ ID NO: 14877 - RNA, 50 nt, synthetic construct
  source 1..50: mol_type = other RNA
tccgtgacatagatcaaatataatattatctggaccaacagataattaca

SEQ ID NO: 14878 - RNA, 50 nt, synthetic construct
  source 1..50: mol_type = other RNA
agaatatatttgccgcataatagaaataaattatgctcaactaatatcgg

SEQ ID NO: 14879 - RNA, 50 nt, synthetic construct
  source 1..50: mol_type = other RNA
taatggacaaagatcaaaatatatactggccgttaataattaaatgcggc

SEQ ID NO: 14880 - RNA, 50 nt, synthetic construct
  source 1..50: mol_type = other RNA
aattaataatcttgatcagaaaaatttacatgaatattttgagtataatg

SEQ ID NO: 14881 - RNA, 50 nt, synthetic construct
  source 1..50: mol_type = other RNA
tccgtgacatagatcaaatataatattatctggaccaacagaaaattaca

SEQ ID NO: 14882 - RNA, 50 nt, synthetic construct
  source 1..50: mol_type = other RNA
tcataaaatcaatcagatcaatatatgtaatataagaatacccgcacatt

SEQ ID NO: 14883 - RNA, 50 nt, synthetic construct
  source 1..50: mol_type = other RNA
agatagaataaatcctgcatttacgtaaataataaacccagaaaagaaac

SEQ ID NO: 14884 - RNA, 50 nt, synthetic construct
  source 1..50: mol_type = other RNA
atattgacacagaacaaatataatattatctagttgactgaataaatcca

SEQ ID NO: 14885 - RNA, 50 nt, synthetic construct
  source 1..50: mol_type = other RNA
ttcttgacatagatcaaatataaaattatctagaccaacagataattaca

SEQ ID NO: 14886 - RNA, 50 nt, synthetic construct
  source 1..50: mol_type = other RNA
tgaaagttaggactatagaagataaatataaataatcaagggaaacgaac

SEQ ID NO: 14887 - RNA, 50 nt, synthetic construct
  source 1..50: mol_type = other RNA
ggtctgatcaaccaatataaatatgttatcaactatataacgaataaaca

SEQ ID NO: 14888 - RNA, 50 nt, synthetic construct
  source 1..50: mol_type = other RNA
atattgacatagaacaaatataatattatctagacccacagagaattaca

SEQ ID NO: 14889 - RNA, 50 nt, synthetic construct
  source 1..50: mol_type = other RNA
ttcttgacatagatcaaatataaaattatgtgtacccatagataattagg

SEQ ID NO: 14890 - RNA, 50 nt, synthetic construct
  source 1..50: mol_type = other RNA
tccaaaaaactgtgacctattataaatataaatatgcgtcagtgaaaatc

SEQ ID NO: 14891 - RNA, 50 nt, synthetic construct
  source 1..50: mol_type = other RNA
gcaaaatagagaatagttcgttgaataaaatataagaatacgaaacgctt

SEQ ID NO: 14892 - RNA, 50 nt, synthetic construct
  source 1..50: mol_type = other RNA
agcaaatattgcgcgtaaaaaaaaatgttctttgatttatcaaatatagc

SEQ ID NO: 14893 - RNA, 50 nt, synthetic construct
  source 1..50: mol_type = other RNA
gattgtaagttaataatcttaccaattcaatttgaaaaattaaataataa

SEQ ID NO: 14894 - RNA, 50 nt, synthetic construct
  source 1..50: mol_type = other RNA
gagtatagagaattcaccgagataaatagatttgaaaaaaaaaatccgag

SEQ ID NO: 14895 - RNA, 50 nt, synthetic construct
  source 1..50: mol_type = other RNA
attaggcgcctaaaatacaaattaactatttacaatataacgatatactc

SEQ ID NO: 14896 - RNA, 50 nt, synthetic construct
  source 1..50: mol_type = other RNA
ctctggacaaagatgaaaaaatattctgcccgtttataatataatccgac

SEQ ID NO: 14897 - RNA, 50 nt, synthetic construct
  source 1..50: mol_type = other RNA
tgaaatttaggacgatagaagaaaaatataaataaccaagcgaaacgtca

SEQ ID NO: 14898 - RNA, 50 nt, synthetic construct
  source 1..50: mol_type = other RNA
ctaattaaggaacaataatttaaaattatctacaccaacaaaatattaca

SEQ ID NO: 14899 - RNA, 50 nt, synthetic construct
  source 1..50: mol_type = other RNA
aattagacataggggaaaaaatattctgccagtttataataataacgatg

SEQ ID NO: 14900 - RNA, 50 nt, synthetic construct
  source 1..50: mol_type = other RNA
ctcttgacatagatgaaatataaaattatctggaccaacagataattacg

SEQ ID NO: 14901 - RNA, 50 nt, synthetic construct
  source 1..50: mol_type = other RNA
ttctagacatagatcaaatataaaattatctggacacacagaaaattacg

SEQ ID NO: 14902 - RNA, 50 nt, synthetic construct
  source 1..50: mol_type = other RNA
gctgatcagcgactattgaagataaatataaatatgttgaatacggacta

SEQ ID NO: 14903 - RNA, 50 nt, synthetic construct
  source 1..50: mol_type = other RNA
cctataacactaagacatatatacttccggacattgactaaaaaaataca

SEQ ID NO: 14904 - RNA, 50 nt, synthetic construct
  source 1..50: mol_type = other RNA
ttcttgacatagatcaaatataaaattatctagaccaacagaaaattaca

SEQ ID NO: 14905 - RNA, 50 nt, synthetic construct
  source 1..50: mol_type = other RNA
aatctgatttagatgaaataccacaatcctattaaaatatataatcagat

SEQ ID NO: 14906 - RNA, 50 nt, synthetic construct
  source 1..50: mol_type = other RNA
aattagacataggtgaataaatattctgcccgtttataataaaaacgatt

SEQ ID NO: 14907 - RNA, 50 nt, synthetic construct
  source 1..50: mol_type = other RNA
tgggaaacatagatcaaaaataatattatctgtacgaaagataatccgaa

SEQ ID NO: 14908 - RNA, 50 nt, synthetic construct
  source 1..50: mol_type = other RNA
ttagccagaaattagtaaaatataatcctacgtaagatgacataacataa

SEQ ID NO: 14909 - RNA, 50 nt, synthetic construct
  source 1..50: mol_type = other RNA
tttgggacatagattaaaatatactctgtctgtccataataaaatcagaa

SEQ ID NO: 14910 - RNA, 50 nt, synthetic construct
  source 1..50: mol_type = other RNA
cgttcaacatagatgaaaaaatattccgccagcctataatatattacatt

SEQ ID NO: 14911 - RNA, 50 nt, synthetic construct
  source 1..50: mol_type = other RNA
aattagacataggtgaaaaaatacaataaattagctacttcaaaacatcg

SEQ ID NO: 14912 - RNA, 50 nt, synthetic construct
  source 1..50: mol_type = other RNA
agaaagatccaaatcaaaatatactctgccggtttataataaaaactgac

SEQ ID NO: 14913 - RNA, 50 nt, synthetic construct
  source 1..50: mol_type = other RNA
gtctggacatagatcaaatataatattatctgtatcgacagaaaattata

SEQ ID NO: 14914 - RNA, 50 nt, synthetic construct
  source 1..50: mol_type = other RNA
gtggaaacatggatcaaatataatattatcaatacgaactgaaaattaca

SEQ ID NO: 14915 - RNA, 50 nt, synthetic construct
  source 1..50: mol_type = other RNA
ccaaagatgaatattaagaaccataataagaataattctccgcaaaaaca

SEQ ID NO: 14916 - RNA, 50 nt, synthetic construct
  source 1..50: mol_type = other RNA
acaaaaatagaataatagacatgcccaacgtaataaatttcgaatacacg

SEQ ID NO: 14917 - RNA, 50 nt, synthetic construct
  source 1..50: mol_type = other RNA
ttcaaaaaactccaatagaagaaaaatataaataaccacgcgaacagaca

SEQ ID NO: 14918 - RNA, 50 nt, synthetic construct
  source 1..50: mol_type = other RNA
ttgctgacatacaaaaaaaaatactccattttgaatatactggcctcatg

SEQ ID NO: 14919 - RNA, 50 nt, synthetic construct
  source 1..50: mol_type = other RNA
caaattaagaaattcaaatatgaaattatctgtacccgcagaaaattaca

SEQ ID NO: 14920 - RNA, 50 nt, synthetic construct
  source 1..50: mol_type = other RNA
ataaagacatagatgagatataatattatctggaccaacagaaaattaca

SEQ ID NO: 14921 - RNA, 50 nt, synthetic construct
  source 1..50: mol_type = other RNA
gccaaataattttgacctattgatcaaaaattattcccattaaaaaaaac

SEQ ID NO: 14922 - RNA, 50 nt, synthetic construct
  source 1..50: mol_type = other RNA
agaaggacatactaaagaaaaaaaattagctttttataatatagtcctaa

SEQ ID NO: 14923 - RNA, 50 nt, synthetic construct
  source 1..50: mol_type = other RNA
agaaaaatccattgatatatcttgaataacattatataaccggaaatacg

SEQ ID NO: 14924 - RNA, 50 nt, synthetic construct
  source 1..50: mol_type = other RNA
gtctggagatagatgaaaaaatattctggccgtttataataaaaactctg

SEQ ID NO: 14925 - RNA, 50 nt, synthetic construct
  source 1..50: mol_type = other RNA
atcttgacatagaacaaatatattattataaataaccaggagacacgccc

SEQ ID NO: 14926 - RNA, 50 nt, synthetic construct
  source 1..50: mol_type = other RNA
tcctagacatagatcaaatataatattatctgtatccacagataattaga

SEQ ID NO: 14927 - RNA, 50 nt, synthetic construct
  source 1..50: mol_type = other RNA
aactggacatagatcaaatataatattatctggaccaacagataattaca

SEQ ID NO: 14928 - RNA, 50 nt, synthetic construct
  source 1..50: mol_type = other RNA
ccgtatggctcaataatataatttattcctaataaaagatgaaatatgag

SEQ ID NO: 14929 - RNA, 50 nt, synthetic construct
  source 1..50: mol_type = other RNA
acaaaaatccactaatataaattaagtagaatatcgtaaccggaaatacc

SEQ ID NO: 14930 - RNA, 50 nt, synthetic construct
  source 1..50: mol_type = other RNA
tcttggacatagatccgaatatatactggcagtgaaatataatatccgag

SEQ ID NO: 14931 - RNA, 50 nt, synthetic construct
  source 1..50: mol_type = other RNA
aatctgatttagattaaatataatattatctggacccacgaaattttaca

SEQ ID NO: 14932 - RNA, 50 nt, synthetic construct
  source 1..50: mol_type = other RNA
agaaggacatacaacaaaaaatactatggccgtttataatataatccgaa

SEQ ID NO: 14933 - RNA, 50 nt, synthetic construct
  source 1..50: mol_type = other RNA
gttctcaaatgactagaaaagataaatataaataatcaacaggcaaaacg

SEQ ID NO: 14934 - RNA, 50 nt, synthetic construct
  source 1..50: mol_type = other RNA
ctcagataatacaatagaaaaaatattacaagcattacgaatacgatcta

SEQ ID NO: 14935 - RNA, 50 nt, synthetic construct
  source 1..50: mol_type = other RNA
agaaaataattttcatctgaaataactacaaatatgcttattaatacaga

SEQ ID NO: 14936 - RNA, 50 nt, synthetic construct
  source 1..50: mol_type = other RNA
tacacattatttaacaaatataatattatctagaccaacagataattaca

SEQ ID NO: 14937 - RNA, 50 nt, synthetic construct
  source 1..50: mol_type = other RNA
gaaattaaggaactcaaatataatattatctgtacggacagaaaattaca

SEQ ID NO: 14938 - RNA, 50 nt, synthetic construct
  source 1..50: mol_type = other RNA
tctaagttacgtctatagaagataaatataaataatcaagggatacgaca

SEQ ID NO: 14939 - RNA, 100 nt, synthetic construct
  source 1..100: mol_type = other RNA
agggaacgaggagacccatgagcaggttgccatatcatccaggggtattatatagtataatataagatagtgactagtacatagtttaatataacttggg

SEQ ID NO: 14940 - RNA, 100 nt, synthetic construct
  source 1..100: mol_type = other RNA
tattatctcatataggggattagaaaatagcagttactgttgaccaatccgcatcaaaagagcgataagtataccgcggaaacatatataatacccatgg

SEQ ID NO: 14941 - RNA, 100 nt, synthetic construct
  source 1..100: mol_type = other RNA
tattataagagagagacgaatataacggcccggcgatacaaagcctggccgtagtaaaataccgattacataatagctaaaaatccctaaggcaatgatt

SEQ ID NO: 14942 - RNA, 100 nt, synthetic construct
  source 1..100: mol_type = other RNA
cagcaatctaaagaacaaggatatgtgccatattagtagcgtgaacgactcaatatccacttacggcagaataatatatcagaagagataaatggacgac

SEQ ID NO: 14943 - RNA, 100 nt, synthetic construct
  source 1..100: mol_type = other RNA
atcattctgatttagttgcatattaattagcgagaataaatgtctaatgcagatattcgagacaagaatggtccggtggatatatggagatttgaaaata

SEQ ID NO: 14944 - RNA, 100 nt, synthetic construct
  source 1..100: mol_type = other RNA
aatcacatggaaattcaaaagttgtgcactgtaatataatattaatcgacctggggtttaagtatgaagcgatgcccttctcaaaatcaaatacaaatat

SEQ ID NO: 14945 - RNA, 100 nt, synthetic construct
  source 1..100: mol_type = other RNA
gtaacattatgataaataatagaattaccatattttgaccatgaacacttcgatattcggcggtggaaaatacaaagtgaacaactaaacagcggtataa

SEQ ID NO: 14946 - RNA, 100 nt, synthetic construct
  source 1..100: mol_type = other RNA
aatcatagggaaattcaaaagttgtgcactgtaatataatattaacgaacctgggtattaagtatgaagcgatgcacttctcaaaatcaaatgaaaataa

SEQ ID NO: 14947 - RNA, 100 nt, synthetic construct
  source 1..100: mol_type = other RNA
gtaaatcgtcacaagacgaaagtgtttataaataacagaagatattatttgctctgacgtaaaagatagacaccaactgtactaaagagatttatttgac

SEQ ID NO: 14948 - RNA, 100 nt, synthetic construct
  source 1..100: mol_type = other RNA
agcatatggccctgacaatatataagccctgaaatacgcttgatgaatcagcatagacctacatttctcataaaactcttagcacataaaatacccatgg

SEQ ID NO: 14949 - RNA, 100 nt, synthetic construct
  source 1..100: mol_type = other RNA
ttgccctgatgatataagttatccaaacttgctgatataaaataatgaacgtccacgataagagttgtacttaaacgtatatatatacttgccatgtgga

SEQ ID NO: 14950 - RNA, 100 nt, synthetic construct
  source 1..100: mol_type = other RNA
gtatttgtatagcaagtctgcccctcaaataatatagaagttgcatagatatattcctcttcatgtcaagtttacattgaaaaattatatctatcgaaga

SEQ ID NO: 14951 - RNA, 100 nt, synthetic construct
  source 1..100: mol_type = other RNA
gattcgatcatcttatgcacattagaatcacaagtcaagagccaagaattgctatatcggcgattgaaaaaaaagactaataagaatttcaattaataat

SEQ ID NO: 14952 - RNA, 100 nt, synthetic construct
  source 1..100: mol_type = other RNA
tgaaattgtagaatactccaaatcgaacagtcggtactcataatcgaccctaaatataattactaatagatcacaaactattatcgacttgttaatatca

SEQ ID NO: 14953 - RNA, 100 nt, synthetic construct
  source 1..100: mol_type = other RNA
cctgggactagagttcgatatatatgctatctcatataatattaacgagcctggaccataagattggtacatagacctacatatctatatctttcgatgc

SEQ ID NO: 14954 - RNA, 100 nt, synthetic construct
  source 1..100: mol_type = other RNA
tgcaggacgataaatttgatgctgtcatataataaccaaatcgtgtacatatagcccgcttcattttaagtcgatattaaaatattatgtgctagtatgc

SEQ ID NO: 14955 - RNA, 100 nt, synthetic construct
  source 1..100: mol_type = other RNA
gtttcgatatgacacacattatccacacttgcggagatatattaatgaaagcccaatacacactgataaatagagataaacgtaactgaagagttaaaca

SEQ ID NO: 14956 - RNA, 100 nt, synthetic construct
  source 1..100: mol_type = other RNA
aactgcaggaataactaaagagcgataccatacttaaagcgcgaatgagtcaatatccgcgtacaccagaataatatatcagaagagatagtaatattta

SEQ ID NO: 14957 - RNA, 100 nt, synthetic construct
  source 1..100: mol_type = other RNA
cagcaagcaaaagaacaacgatacaaaaaatgacaattaataatcggccctttatttaccaacacacatatccgttacggctggtattaaattaagacac

SEQ ID NO: 14958 - RNA, 100 nt, synthetic construct
  source 1..100: mol_type = other RNA
tgcataacgataaattacaaattaggaccatatttataccgtcaatatcttagtattcataggtcggaaatcctaactgaacatttaaagagctttataa

SEQ ID NO: 14959 - RNA, 100 nt, synthetic construct
  source 1..100: mol_type = other RNA
ctgcgcctgatgatattatttacacagtcaaacatcagaagaaaatcaacactgaatgggaccgattaaataaaatcacaaaatctctacaataatgtaa

SEQ ID NO: 14960 - RNA, 100 nt, synthetic construct
  source 1..100: mol_type = other RNA
aagacgagttggtcaaaatatgctttaatataaaaagtattaattgaaccaaaaaattaaaacagaccttgaaagtcaatctagattcgccctaagttat

SEQ ID NO: 14961 - RNA, 100 nt, synthetic construct
  source 1..100: mol_type = other RNA
tactgggggatgcgataggctgtgtttgcagcggcatacacgacatatatataaattcactaaatacattgaaaatccacctagattcgacattaagtca

SEQ ID NO: 14962 - RNA, 100 nt, synthetic construct
  source 1..100: mol_type = other RNA
cctgcgtcttgagttagctatataggcaataccaaataaagatattatgtgcgctgacgtaaaagattaaaaccaactgtactaaagagatttataagac

SEQ ID NO: 14963 - RNA, 100 nt, synthetic construct
  source 1..100: mol_type = other RNA
gaatcgatcattttatggagatttgaatgaccagtcaaaaggcaagaattgctatatgggacggataaaataaagactaattagcattttaattaataat

SEQ ID NO: 14964 - RNA, 100 nt, synthetic construct
  source 1..100: mol_type = other RNA
ccaacttttcacggactccgggttgggagataaatagtattaataggactaaaaaattaggacacacattaaaaaataaccgatcctcggcctccgtaat

SEQ ID NO: 14965 - RNA, 100 nt, synthetic construct
  source 1..100: mol_type = other RNA
tattccgcttagtcaaataattatcactggtcatataaacatattccttagagaaaggattgtttttggattatacgcaaatatattcgtacgtacgtaa

SEQ ID NO: 14966 - RNA, 100 nt, synthetic construct
  source 1..100: mol_type = other RNA
gttaccttaaaataaataatatctccgcatctcttataaggttaaagatcgtgtcgcataacaaacgtactaaaaggtatatatataggtgacctgtggt

SEQ ID NO: 14967 - RNA, 100 nt, synthetic construct
  source 1..100: mol_type = other RNA
acacgaactatttagatcatacctacatataagtcatggatgatgactttgaatgtgcttatgaaggagtaggataaataaatatacatttgtattggaa

SEQ ID NO: 14968 - RNA, 100 nt, synthetic construct
  source 1..100: mol_type = other RNA
aacagtaggaaaaactaaagatctataccatacttaaagcgggaatgagtcaatatccgcgtacagcagaataatatatcagaagagatagtaatatcta

SEQ ID NO: 14969 - RNA, 100 nt, synthetic construct
  source 1..100: mol_type = other RNA
cctgcgatgggatgccaatatataagctatcatatataatacggatggacgtctgccatacgatgtggtataatatctaaatgccactgagatcaactca

SEQ ID NO: 14970 - RNA, 100 nt, synthetic construct
  source 1..100: mol_type = other RNA
taagcctccagtacacgtaaatatcaatatttatatagacatgtgtgaattcctggatttagcgaattagcgcgtgatgagatttagagatttaattgac

SEQ ID NO: 14971 - RNA, 100 nt, synthetic construct
  source 1..100: mol_type = other RNA
cgtgcgatgtgagacacgactatattcgtgagcggataatatatatgaccatcgataaattatcaccccttaagatagccttatatacaaatcgtagtct

SEQ ID NO: 14972 - RNA, 100 nt, synthetic construct
  source 1..100: mol_type = other RNA
tactgggagatgcgataggcttttcttggagcggtataaacgacatatatataaattcactaaagtaaattaatacgaataggagcaacctattaagtca

SEQ ID NO: 14973 - RNA, 100 nt, synthetic construct
  source 1..100: mol_type = other RNA
tgcgtaacgataaattacaaattaggactgggtttatatgattaacgatccactagcatcagatattaagtagtaagagaacccataaagaacatgtaca

SEQ ID NO: 14974 - RNA, 100 nt, synthetic construct
  source 1..100: mol_type = other RNA
cattcagagtgagtccaatataaagcaaagaagcgacgtaaaatgactaagaatagaataaaattggtaattaaacgccacgttcaaagaagagttcggc

SEQ ID NO: 14975 - RNA, 100 nt, synthetic construct
  source 1..100: mol_type = other RNA
ctaagcccttgagtccattataattaatgaaatcacgtgaagaagagattgaatcgattagggatgaagcaataaaggacatatataaggtttaccaagt

SEQ ID NO: 14976 - RNA, 100 nt, synthetic construct
  source 1..100: mol_type = other RNA
aatcaaaagcaatttcaaaatttgcgccatgtaacaaaattttaatataccatggtattaattaaaaagcgagactcttctcttttagatgttcaagtct

SEQ ID NO: 14977 - RNA, 100 nt, synthetic construct
  source 1..100: mol_type = other RNA
ctgcaatataacacaggttctaactgaaatttactataacttcaagagacaatccttgttgactaatagatcacaaacaatcatggaaaaaataagacac

SEQ ID NO: 14978 - RNA, 100 nt, synthetic construct
  source 1..100: mol_type = other RNA
tggctctgctcaaatatactatccttaaatgttcatatagtgatttgacttatatgacgtaacagattgaaaccaactgtactaaacagaataattatcc

SEQ ID NO: 14979 - RNA, 100 nt, synthetic construct
  source 1..100: mol_type = other RNA
ataaccttaccataaatattatccaagttgcgcggataagatatatgagcatcgataaattatcacctcttaagatagccttatatacaaatcgtagtcc

SEQ ID NO: 14980 - RNA, 100 nt, synthetic construct
  source 1..100: mol_type = other RNA
cccagacattgattaagtatggacagattttcatcgagaattatcactcatcttacatccacgtttgtaatgaaacggatatataaaataatagtcaaat

SEQ ID NO: 14981 - RNA, 100 nt, synthetic construct
  source 1..100: mol_type = other RNA
aatcacagacaagttcaaaatttgtacaatgtaatataatattactgaactccagcatggaacgattgaatgaaccggagattatcaaaaatagtcaaat

SEQ ID NO: 14982 - RNA, 100 nt, synthetic construct
  source 1..100: mol_type = other RNA
catagatcacgggttctatagctaaggcgccaaatcatccagtagtattatatagtataatataagatgatataagactattatcgactgttgaattatg

SEQ ID NO: 14983 - RNA, 100 nt, synthetic construct
  source 1..100: mol_type = other RNA
ttaaataacctctacataaaaatagcacgactcttgctgagtaagacttagaatttgaatggcccgcaacagtacggataatataatcatatcgagtaaa

SEQ ID NO: 14984 - RNA, 100 nt, synthetic construct
  source 1..100: mol_type = other RNA
ttatataccctctacataaaaatatcacgagtcttgatgagtatgacttagaattggattgtccagcaacagcagatataagtaactgaagatttaaaca

SEQ ID NO: 14985 - RNA, 100 nt, synthetic construct
  source 1..100: mol_type = other RNA
ctaagcccttgagtccattaggttcgaagataaaaagtattaatagaactaaaaaattaggactcagattaaaaattaaccgatcttcggcctccgtaat

SEQ ID NO: 14986 - RNA, 100 nt, synthetic construct
  source 1..100: mol_type = other RNA
gtaaatcggcacacgatgaaactgaatataaacaccagaagatattaagtgctctgacgtaacagatttaaaccaactttactaatgagatttattagac

SEQ ID NO: 14987 - RNA, 100 nt, synthetic construct
  source 1..100: mol_type = other RNA
aaacggagtgagtcacaaaaatataagtacatatatcaacatctgttaattccagcactgagcgataaaggcgagacataaatagcagctgtgcggataa

SEQ ID NO: 14988 - RNA, 100 nt, synthetic construct
  source 1..100: mol_type = other RNA
tggcactgaagaaatatactgtccatacctgatgatatagtgaatcagttggctccggctgtggaccatataatatctaaatgtccctgatattaactca

SEQ ID NO: 14989 - RNA, 100 nt, synthetic construct
  source 1..100: mol_type = other RNA
gtaaacaaaaaataaatgcatattatggttggggaatagagtggttggccacattaaaattaccacgatttaatattgcctcctgtaactcgcgattaaa

SEQ ID NO: 14990 - RNA, 100 nt, synthetic construct
  source 1..100: mol_type = other RNA
gtaccaataggataaatcaatctgctggtggtggcataaacgagatataaaaatatccaataaagtcgattaatcagaattgccgcaacctattacgctg

SEQ ID NO: 14991 - RNA, 100 nt, synthetic construct
  source 1..100: mol_type = other RNA
ctgaaatccaaataattgaagataggtctgcgatcataatagtgatgaagggtgcccatcagaaatccaatagttagagaactcataaagaacatgtaaa

SEQ ID NO: 14992 - RNA, 100 nt, synthetic construct
  source 1..100: mol_type = other RNA
atgacctgatcataaatatttaccaaactttcccctataaattaatgaccctccactacacaatctgcagagaggcgcacatatatagaatattagctca

SEQ ID NO: 14993 - RNA, 100 nt, synthetic construct
  source 1..100: mol_type = other RNA
gatagggcagatactttatattcataaatttatgaaatatattaatgaacctatcaaaattaacacaattttgcaaagtcttatccatagctgtgtatgt

SEQ ID NO: 14994 - RNA, 100 nt, synthetic construct
  source 1..100: mol_type = other RNA
cttgcgatgggagtacaatatatatgctatcatatataatacggatggacgtgtctctttttggaggagatcaagaaataaaaaccgtatgtcactgatt

SEQ ID NO: 14995 - RNA, 100 nt, synthetic construct
  source 1..100: mol_type = other RNA
gtaacattgtgagtcactgatatcgtactaaattgacgaaaaatgagcatatatacatcctcattgctggtcgagaaataaatagttgaagagctaaatg

SEQ ID NO: 14996 - RNA, 100 nt, synthetic construct
  source 1..100: mol_type = other RNA
cgcaacaaaaaatagaagaatattatggttcgcgaatagagtggttggtcacatcaaaattaacacgatttaatattgcctcctgtagctcgcgattaaa

SEQ ID NO: 14997 - RNA, 100 nt, synthetic construct
  source 1..100: mol_type = other RNA
acaagaattattttttcggtaatattgtctattcaaaaaattttcaagaaaccctcatcgctaatgattgaatcaggtaataagcatttcaattaataat

SEQ ID NO: 14998 - RNA, 100 nt, synthetic construct
  source 1..100: mol_type = other RNA
atgacctgaccatatatattatccaagttgtgcggaaaagatatatgaccatcgataaattatcacaccttaagatagccttatatacaaatcgtagtcc

SEQ ID NO: 14999 - RNA, 100 nt, synthetic construct
  source 1..100: mol_type = other RNA
ctcaagacgtaagttcgaaattctttcaatctaatataataacaatcaacgtcggtatgaaggatgaagcgataccgttctcaaaatcaagtaaaaatac

SEQ ID NO: 15000 - RNA, 100 nt, synthetic construct
  source 1..100: mol_type = other RNA
aagtacagggaaattcaaaaggtgttcactgtaatataattaacgacctgagattatgacacgacgattgcccgcgagaatatatagagatacaatcaat

SEQ ID NO: 15001 - RNA, 100 nt, synthetic construct
  source 1..100: mol_type = other RNA
acggcgatatacataggatatttatgtttaaatcgacaagattgcatagcgtacaaactaaaaatgaagtgataacgcccatatattcgtgataataatg

SEQ ID NO: 15002 - RNA, 100 nt, synthetic construct
  source 1..100: mol_type = other RNA
caagtgcacatttcataccgccattctcaaacatacctttttaaacaagataataatggcaacgaataaatccaagacatccaaaacaaaattcatacag

SEQ ID NO: 15003 - RNA, 100 nt, synthetic construct
  source 1..100: mol_type = other RNA
tgaaggacgataaatttcctactctggtatcttatataatacggatggacgtctgctataatgcgtggaattagacgataatacatggttgataaactca

SEQ ID NO: 15004 - RNA, 100 nt, synthetic construct
  source 1..100: mol_type = other RNA
catccgctgataatattatttactcagtcggaaatccgaagataatcgacacggaatggggccgattaaataaaatcacaaaatctctccaattaggtag

SEQ ID NO: 15005 - RNA, 100 nt, synthetic construct
  source 1..100: mol_type = other RNA
actggagtcaaaattgaagatagataaaagccacgtgccaatattgatgtgtcgataaattatgaccccttaagatagccttatatacaaattgtattcc

SEQ ID NO: 15006 - RNA, 100 nt, synthetic construct
  source 1..100: mol_type = other RNA
cctgccatgtgatgctgaaatataaaactactatcgagatttataactcatgttacacccacattgatcgaactcccgtgaatctatatacatattccga

SEQ ID NO: 15007 - RNA, 100 nt, synthetic construct
  source 1..100: mol_type = other RNA
atatttgtaagggatgtctgactctcatataatttacggtcaagaaacatatagccagcttcatttttctgataagagaaaatattatttagttccatgt

SEQ ID NO: 15008 - RNA, 100 nt, synthetic construct
  source 1..100: mol_type = other RNA
gtaagtctaaattagactaatatgaaaacactagaaataatttcaaatccggtaacagcagaatttttacgaaaagagaaaatcttacttatttgcgagt

SEQ ID NO: 15009 - RNA, 100 nt, synthetic construct
  source 1..100: mol_type = other RNA
ataacctgaccatatatattatccaagttgcgcggataagatatatgagcatcgataaattatgaccccttaagatagccgtatatacaaatcggagtcc

SEQ ID NO: 15010 - RNA, 100 nt, synthetic construct
  source 1..100: mol_type = other RNA
cctgccatgtgatgctgaaatatatgctatcagcgttaatattggctgaaacaacgttggagagatttagcgcccgatgaaatatagagatttaatagac

SEQ ID NO: 15011 - RNA, 100 nt, synthetic construct
  source 1..100: mol_type = other RNA
gggaatcacatgaagacggctataccgaaggtggaatacacgggacatatatacatccaaaaaagaagatgaatccgaacataagtacgcttttgaataa

SEQ ID NO: 15012 - RNA, 100 nt, synthetic construct
  source 1..100: mol_type = other RNA
cctcttactcgggaagatcagatcttaaaaatcatagaatattaatgaaccacgaccataagatcggtacaaagaaattattacacaaacatgcgtatat

SEQ ID NO: 15013 - RNA, 100 nt, synthetic construct
  source 1..100: mol_type = other RNA
ccaacttttcacggactccgggctggaagataaatagtattaatagaactaaaaaattaggacagacattgaaaattaaccgatattcggcctccgtaac

SEQ ID NO: 15014 - RNA, 100 nt, synthetic construct
  source 1..100: mol_type = other RNA
cccttcgagaagcccataatagaaataccagttcaagagatgtcgatttaacatctattaaatatcaagtgtgccacttattaaaatcaaatgtacgtac

SEQ ID NO: 15015 - RNA, 100 nt, synthetic construct
  source 1..100: mol_type = other RNA
ataaccattagaagtttgaggcatccccgataaaacatataataactcttaaagtatatgaaatgatccttaagatagccttatataaaaatcgtagtcc

SEQ ID NO: 15016 - RNA, 100 nt, synthetic construct
  source 1..100: mol_type = other RNA
ctaagcccttgagtccattatatttaacgaaaatcgagaaatatgagatagattaatgataatttatcagggcactttgtgcggcatttcaattaataat

SEQ ID NO: 15017 - RNA, 100 nt, synthetic construct
  source 1..100: mol_type = other RNA
gaaagttcatggaagacgaaagtgatgatacagaccagaagaatcggacacaaaattcgtatgcgtgaaattataatcatatataatattgtggtcatat

SEQ ID NO: 15018 - RNA, 100 nt, synthetic construct
  source 1..100: mol_type = other RNA
gaaacgctaagatatagagtagtcccatataatctacgatcatgaacatagaatgttctcatgtaggccgacgagatataattaactgaagagttaaaca

SEQ ID NO: 15019 - RNA, 100 nt, synthetic construct
  source 1..100: mol_type = other RNA
atatttgtaaaggatgtctgactctcatataatttacggtcaggatacatatagccagcgtcatttttccgataagagaaaatattatttagttccatgg

SEQ ID NO: 15020 - RNA, 100 nt, synthetic construct
  source 1..100: mol_type = other RNA
cttccactgataatattatttacacagtcaaacatgagaagataatcttcacgcaatgggaccgattgaataaaatcacaaaatctcttaaataaggtaa

SEQ ID NO: 15021 - RNA, 100 nt, synthetic construct
  source 1..100: mol_type = other RNA
acaccacttatctagtcgctaataatctgaatccaaaaattcctcagaaatctagaatagatcgatatatgtgtaatatattacaatcttagcgagtaaa

SEQ ID NO: 15022 - RNA, 100 nt, synthetic construct
  source 1..100: mol_type = other RNA
cgacagagttactagataataataatactgaagcgtcggcaactgtgatctccagcattgagcgatttagcgcccgaggaaatatagagatttaatagac

SEQ ID NO: 15023 - RNA, 100 nt, synthetic construct
  source 1..100: mol_type = other RNA
gaaaacacggcaacaaatatatatattatactcggttaattaaagatttgctagacacacagcgattgctcgaagatgatacgaatgtatgatacttaat

SEQ ID NO: 15024 - RNA, 100 nt, synthetic construct
  source 1..100: mol_type = other RNA
actgtatggttaacattaatttcaagcgcatatttataatacgatagcgtttaactgaacaaatatgcctatgtttaatgtatgacttttgatataaaat

SEQ ID NO: 15025 - RNA, 100 nt, synthetic construct
  source 1..100: mol_type = other RNA
attaaaaatgttgacgcttaaaaagaaagattaggatagcagatatgtagctattaatataaaggtggaggcgtggatattacgacgtatgatattagaa

SEQ ID NO: 15026 - RNA, 100 nt, synthetic construct
  source 1..100: mol_type = other RNA
cataaaaagaagaacatgggaataagaaggactgccgagattattagcttccactccatattacgcccaaagtaaattaatctaaaacgaaggcatatct

SEQ ID NO: 15027 - RNA, 100 nt, synthetic construct
  source 1..100: mol_type = other RNA
atttaaaagattgacgcttaaaaattgatgtagaaaagaaggcggaagatatccgataaaatactggaacaactgagcatcgaagtactattctctgtga

SEQ ID NO: 15028 - RNA, 100 nt, synthetic construct
  source 1..100: mol_type = other RNA
attaaaagtattgacgtttaaaaagcaagattgagataggagaaatgacctgaactgtaaatattggaagaactaatatcgatggtgaatattcatacgt

SEQ ID NO: 15029 - RNA, 100 nt, synthetic construct
  source 1..100: mol_type = other RNA
acgatacagaagaacatggtaataagaagggatgacgagatgattagcttccactccatattacacccaaagtaaattaatgtttaaagaaggcatatct

SEQ ID NO: 15030 - RNA, 100 nt, synthetic construct
  source 1..100: mol_type = other RNA
cttaaaaagaagaacatggaaataagaaggactgactagattattagctcccactccatattccacccaaagcaaattattattaaacgaagccatatcc

SEQ ID NO: 15031 - RNA, 100 nt, synthetic construct
  source 1..100: mol_type = other RNA
cgggtcctcatagtctggattccccggaaatagtattagactaaaattgacgtggactatattaattcacagagtatgagatagacgaaataataactgg

SEQ ID NO: 15032 - RNA, 100 nt, synthetic construct
  source 1..100: mol_type = other RNA
ttactggacgatacacaaaaccgaaaaagtaaagttttccagacaattgatgtgtaatatattaattcacagagtatcaggaaaagcaatttaaaaataa

SEQ ID NO: 15033 - RNA, 100 nt, synthetic construct
  source 1..100: mol_type = other RNA
gcggactattcaaagaaaaaatcaagtggaaatttttgacgtggttaatagtgatagtatggcgtgaataattaagaatacgattaacgaaggactttgt

SEQ ID NO: 15034 - RNA, 100 nt, synthetic construct
  source 1..100: mol_type = other RNA
gtgtcgagcatataagaggagcgtctgccacgcgaagtaatcagttataatgcttggaacttttataaaaaaaaataagatcataattggtgggatagag

SEQ ID NO: 15035 - RNA, 100 nt, synthetic construct
  source 1..100: mol_type = other RNA
cttaaaaacaatacataagaacataacaaacgaccctctgaagaaattaatgactagtgggcagtcgaaataactatctagtaaaacatccaagctcggg

SEQ ID NO: 15036 - RNA, 100 nt, synthetic construct
  source 1..100: mol_type = other RNA
catcatcttaaataaggcgctagatatacggaaaaactccgaatcgagattgtaaaacatttgaccagtgaaacttgccacactatataaaaaagaatgt

SEQ ID NO: 15037 - RNA, 100 nt, synthetic construct
  source 1..100: mol_type = other RNA
ttaccgggatccactatgtgtatatacctagaaaattattaaaacagtggacatatacagacgttttctgccaataatagaatccataatactccgcgag

SEQ ID NO: 15038 - RNA, 100 nt, synthetic construct
  source 1..100: mol_type = other RNA
gctaaaaatattaaagcttcaaaagcaggactaggatagggaaaatgtagcaattaattccaaagtgcgttaccaaagatgattataaaaaaatcggggc

SEQ ID NO: 15039 - RNA, 100 nt, synthetic construct
  source 1..100: mol_type = other RNA
aatcaacagagcgatataaataaattagtaaattgtacgagtaacaggggatacttaattacaaagatttcaccttgcgactaagatattagctcgacct

SEQ ID NO: 15040 - RNA, 100 nt, synthetic construct
  source 1..100: mol_type = other RNA
cgagaaataactccgacaggtctacacctaattatacgaaatatatatagacagatacagccattcccttcagatattagaattcatttgagagccagat

SEQ ID NO: 15041 - RNA, 100 nt, synthetic construct
  source 1..100: mol_type = other RNA
agcgtattgtttgaattaaaacataacagtcgtccctctgaagaaaataacgactagttaacagacaaaataactctgtagtaaaatatcaaagctgcag

SEQ ID NO: 15042 - RNA, 100 nt, synthetic construct
  source 1..100: mol_type = other RNA
gtaacaaagattaacagggaacgcagtagatgggaataaaaataaatcacagtgaaacatggcgtgaataattatgaagacgattaacgaaggactttgt

SEQ ID NO: 15043 - RNA, 100 nt, synthetic construct
  source 1..100: mol_type = other RNA
ggttccgctgaatgaaaaatatataaaattcaaggttaatgaaacaatcactggatgtccccacatccttcagatattagaattcatttcaaaggcagat

SEQ ID NO: 15044 - RNA, 100 nt, synthetic construct
  source 1..100: mol_type = other RNA
gggcaatagatccaggagggaacatcgcgtaaaatcatccttaaataatatgtgcgttaaaaatggcggtgatacaatcttataagggaggaaatataaa

SEQ ID NO: 15045 - RNA, 100 nt, synthetic construct
  source 1..100: mol_type = other RNA
ggtcaatcgacccatagcaataaatcccagttattgaataaaggcagcgcagctccgaacaattatataacaaaattaggtcataattgaatatttggct

SEQ ID NO: 15046 - RNA, 100 nt, synthetic construct
  source 1..100: mol_type = other RNA
acagagtcttggcataacaatataaataaacacgacccgcaatacagcaagatgcaaataagaatgaacaagtaaaacgatattctaaaagtaacggggt

SEQ ID NO: 15047 - RNA, 100 nt, synthetic construct
  source 1..100: mol_type = other RNA
attgattatatgactagctgtatatctctccacttcgaatagataaatagaaggaagtagatgacaatttaaactgtcctcagaaaaataaacgctctcg

SEQ ID NO: 15048 - RNA, 100 nt, synthetic construct
  source 1..100: mol_type = other RNA
actgataataggaaaaataatgaagactggattgttggtaggaaaaatcagtagagattatttgtggaagatcataggtaatgagtgaagaatcaaatgg

SEQ ID NO: 15049 - RNA, 100 nt, synthetic construct
  source 1..100: mol_type = other RNA
ccatagccgctactcgatattcaaatttttaggtattagtcctcgccttaattaaaatttaataagaaaaagtaaaaccatattcgaagatggcatagtg

SEQ ID NO: 15050 - RNA, 100 nt, synthetic construct
  source 1..100: mol_type = other RNA
ggtcataggcgccatataaataaattagtaaatgtgacgagataatcaatgatcaggagcggttacatcttggtcataagattgttgatgttattactaa

SEQ ID NO: 15051 - RNA, 100 nt, synthetic construct
  source 1..100: mol_type = other RNA
ttactggacgatacacaaaaccgaaaaagtaaagttggccagacaattgacatgcaatatattaattcacagagtatgaggaaaaccaatttaaaaataa

SEQ ID NO: 15052 - RNA, 100 nt, synthetic construct
  source 1..100: mol_type = other RNA
agaaaaaacttttacgactaacaaatacatttgacaacaatcattaatattgttctatatcgctgtgcccattctaagcagattaaaataaacgccgtgg

SEQ ID NO: 15053 - RNA, 100 nt, synthetic construct
  source 1..100: mol_type = other RNA
ataaaaaagataaacgtgtaacaattagaaattagcctagaaatcccggcatgaaatataattgactacgccagtgcatctcagaccaggttaatcacgg

SEQ ID NO: 15054 - RNA, 100 nt, synthetic construct
  source 1..100: mol_type = other RNA
aggtacgtagaaaaatttgtacattaaatacctggcccatgcatattatggaacatagagacgaattcctagaacatgatattaaactagactatttaat

SEQ ID NO: 15055 - RNA, 100 nt, synthetic construct
  source 1..100: mol_type = other RNA
tctgacaatttaacgaaaaaatcaagaagaaattcctggcgtggttaatagttatagtctggcgtgaaggattaagaagacgattaaagaaggactttgt

SEQ ID NO: 15056 - RNA, 100 nt, synthetic construct
  source 1..100: mol_type = other RNA
ataattaatattgaccctaaaaaactagtcttagtagaggcaaattgtagatcggtaaaataagtgactgagcataatgatgttagctaagatattgaat

SEQ ID NO: 15057 - RNA, 100 nt, synthetic construct
  source 1..100: mol_type = other RNA
tatcaaaggaggataatacacggcccttaatagcagtaaaataaaatgaaaaaaagccaccaaaattgctctatgggaaaatgtagcgatgatttttacg

SEQ ID NO: 15058 - RNA, 100 nt, synthetic construct
  source 1..100: mol_type = other RNA
ctgattaggcgagtatttcctcatgaacttgaaaattaattattgtaagcagaataaaaaatattggcacagccagagttgatactaaaactacatcgat

SEQ ID NO: 15059 - RNA, 100 nt, synthetic construct
  source 1..100: mol_type = other RNA
attaaaaatttttatgcttaaaaagcaagattaggatatgacaaatgtattaacgataaaataatgcagaaactagtgtttctcgctctgagacatgtca

SEQ ID NO: 15060 - RNA, 100 nt, synthetic construct
  source 1..100: mol_type = other RNA
ggttccgctgaatgaaaaatatataaaattcaaggttaatgaaacaatcactagatgcccccatattggtcgaagatcacacaaatcaatgttatttagt

SEQ ID NO: 15061 - RNA, 100 nt, synthetic construct
  source 1..100: mol_type = other RNA
ggatataggataaaggcacagggactcaaatggggtgttaaataaatctcggcttaggacaattagataatcaaataaggtttcaattaaaaatccaggt

SEQ ID NO: 15062 - RNA, 100 nt, synthetic construct
  source 1..100: mol_type = other RNA
aggtaccctgaataatatgtaaattaaatacttggccggtacagactagggatcatagagaaacattcctagaacgagatatgaaactagacgtgttaat

SEQ ID NO: 15063 - RNA, 100 nt, synthetic construct
  source 1..100: mol_type = other RNA
gcccaagatagaaggatttaatcaagagaaaatttttggcgtggttaatagttatagtctcgcgtgaataatgaagacgcgatagtaaatattcatctgt

SEQ ID NO: 15064 - RNA, 100 nt, synthetic construct
  source 1..100: mol_type = other RNA
cggattagacgggtatttcctcattaacttcaaaattaaaataactactccaggaagtagatgacaattaaaactgttcgccgaaatattaacgaactgg

SEQ ID NO: 15065 - RNA, 100 nt, synthetic construct
  source 1..100: mol_type = other RNA
ccacagccactactcgatataaaaattattatgtattcgtcctcaccctacgagaaaattaaaaagaaaaagtaaaacgatatgcaacgatgggaaaggg

SEQ ID NO: 15066 - RNA, 100 nt, synthetic construct
  source 1..100: mol_type = other RNA
cataatccgataaggccaactaaattagtaaagttgacgatgaaaataatcctcgaaaaaatatcgtaaagacgggtgtatctcgcactgtaacatgtca

SEQ ID NO: 15067 - RNA, 100 nt, synthetic construct
  source 1..100: mol_type = other RNA
ataaaaagtattgacgcttaaaaatcaagattaggataggtatactcagagtagtcatcaaaagaatacaattagaaggagagtataaaacagggggggt

SEQ ID NO: 15068 - RNA, 100 nt, synthetic construct
  source 1..100: mol_type = other RNA
acagagtcttggcataacaatataaaaaaaaacgacgggcaaaccagcaagctggaaattagaaagaacaagagactctatatcctaccttggcatatta

SEQ ID NO: 15069 - RNA, 100 nt, synthetic construct
  source 1..100: mol_type = other RNA
ataaaaagtattgacgcttaaaaatcacgattaggataggtatactcagagtagtcatcacaagaatataatgagaaggagaatataaaacaggggggct

SEQ ID NO: 15070 - RNA, 100 nt, synthetic construct
  source 1..100: mol_type = other RNA
ataaaacggacgtataaagtgggcgcgcatatattgtataaatccagcgcatagctataacgacaatggaactatataatatgacgctaagatattgatt

SEQ ID NO: 15071 - RNA, 100 nt, synthetic construct
  source 1..100: mol_type = other RNA
tttaaaaatattgacgctttacgccctctatcggaatataaataggtcatagtgaatctgtgaccgaggacaaccactgatggtgaaatattaatctgag

SEQ ID NO: 15072 - RNA, 100 nt, synthetic construct
  source 1..100: mol_type = other RNA
cagaatccgatacggcccattaaaaaagtaaagttcacgaagaaaataaacctcgaataaaaattgcaaagacgagtgtatctcgcactgtaccattaat

SEQ ID NO: 15073 - RNA, 100 nt, synthetic construct
  source 1..100: mol_type = other RNA
cgcgacagatctccgtcagctcgacgcctaataatataatgtaagattctatactcccggcactagactaagaataaggtaacattaaaaataacggcgt

SEQ ID NO: 15074 - RNA, 100 nt, synthetic construct
  source 1..100: mol_type = other RNA
ataataaaaattcacgcctaagaattacactaccacataaaaaaatgtatgagttgctgttaagccgccggacgaaaggtatttttaaataaagtggtgt

SEQ ID NO: 15075 - RNA, 100 nt, synthetic construct
  source 1..100: mol_type = other RNA
ctgaatccgatgaggcgaactaaattagtaaagtctacgaaaaaaaaaatccttgggaaaatattgcaaagacaagtatatctcgtacacgcatatctat

SEQ ID NO: 15076 - RNA, 100 nt, synthetic construct
  source 1..100: mol_type = other RNA
attagaaatacttacgcttaaaaaggaagattaggatttgaaaaatttagctcttcgtgaaaaggcgccggacgaaagatattcctaaataattcgtaat

SEQ ID NO: 15077 - RNA, 100 nt, synthetic construct
  source 1..100: mol_type = other RNA
aggtacgctaaaaaatatgtaaattaaatacctggcccatgcatattatcgatcattgagacgcactcctagaacatgatatggaactagactatataat

SEQ ID NO: 15078 - RNA, 100 nt, synthetic construct
  source 1..100: mol_type = other RNA
gatgaatggacacatagcgataattccgacttattcaaaaaagataaaatttctctagagaaatacgcgaatttaaagattgtatacgaagttagtttgc

SEQ ID NO: 15079 - RNA, 100 nt, synthetic construct
  source 1..100: mol_type = other RNA
cctctctaaatacgaagaggtacggttgttaaaatatttgaaaaagtctaaaattgcttcaaaaattgctcgctattaatatgaagttatgattttttat

SEQ ID NO: 15080 - RNA, 100 nt, synthetic construct
  source 1..100: mol_type = other RNA
ataataataattcacgcctaagaattacagttaataacaatcaccaatctttttctagatcgtcttgctcaatctaatcttattaaaaataaagcggtga

SEQ ID NO: 15081 - RNA, 100 nt, synthetic construct
  source 1..100: mol_type = other RNA
ataaaaaccacccacggttgaaaataaataactgattcccacagcccttatgcgagataaataagggggggagtcaaactgctgagggatgaaatattaa

SEQ ID NO: 15082 - RNA, 100 nt, synthetic construct
  source 1..100: mol_type = other RNA
caacatttcaagtatatcgagacatatacgtacaaactacgggataatagacggatacagacgagaccagccgaagttaaaataaactatagatccggga

SEQ ID NO: 15083 - RNA, 100 nt, synthetic construct
  source 1..100: mol_type = other RNA
gtttcgagcatataagagaacctactatagtgcggagtactcagttatattactctgacctattataaaaaaaagcataaagctataccatgggataaat

SEQ ID NO: 15084 - RNA, 100 nt, synthetic construct
  source 1..100: mol_type = other RNA
aagccttggagctatattaatcaggttgtgaacatttctgaaatactgttgaaactcctcataaattgctcgatattaatataaaccaataattcgagag

SEQ ID NO: 15085 - RNA, 100 nt, synthetic construct
  source 1..100: mol_type = other RNA
gatcaaatgagctatataaatagattgctaaatatgacgagatgatccatgatcaggagccgatatatcttcatcataagattgagcatattatgcctat

SEQ ID NO: 15086 - RNA, 100 nt, synthetic construct
  source 1..100: mol_type = other RNA
actgagaccactaaaaataaatgaagttcgactggaatggacacttaaaaattctgacaccatctgtaaaaatattggccggtgaatgtgttagaagaaa

SEQ ID NO: 15087 - RNA, 100 nt, synthetic construct
  source 1..100: mol_type = other RNA
actgagattactcagaataaactaaaattgactggactcggatgattatggatcatatagacccattcctagaacatgagatgaaacaacaatatttaat

SEQ ID NO: 15088 - RNA, 100 nt, synthetic construct
  source 1..100: mol_type = other RNA
ataataaatattgaccctaaaaaactagtctgagtagaggcaaaatgtaggtcggtaaaataagtgaatgagcataatggtgttagttatgatattgaat

SEQ ID NO: 15089 - RNA, 100 nt, synthetic construct
  source 1..100: mol_type = other RNA
cagagtccgataagtccaactaatatagtaaagttcacaaagaaaattaaccccgaaaaaaaactgcaaagacgagaatatctcgcacggcatcattaat

SEQ ID NO: 15090 - RNA, 100 nt, synthetic construct
  source 1..100: mol_type = other RNA
actgagattactctgtataaacgaaaatagactgggctcggatgattatggatcatatagacccattcctggtacatgatataaaacaacaatattaaat

SEQ ID NO: 15091 - RNA, 100 nt, synthetic construct
  source 1..100: mol_type = other RNA
gaaaccaagattaactgggaaccccgtagatgggaataaaaataaatcacagtgaaactgttaccgaggataaacactgatactgaaatattaatgtgag

SEQ ID NO: 15092 - RNA, 100 nt, synthetic construct
  source 1..100: mol_type = other RNA
cctgatcatcggcaaaaaaatggaaagtgtattgtcggttggaaaaaccagtacagattaaaagtggtggatcatagttaagaagtgaataatatataat

SEQ ID NO: 15093 - RNA, 100 nt, synthetic construct
  source 1..100: mol_type = other RNA
cataatccgataaggcgtactaattgcctaaaaataacataagacatagaagactcgcggcaacagagctctaaggaggtaatattaaaaaaagcgtggt

SEQ ID NO: 15094 - RNA, 100 nt, synthetic construct
  source 1..100: mol_type = other RNA
gttcaatctacccatagcgataattcccacttattgaatacatgcagcacagcttcgaacaattatataacaaaattacgtcataattgaatatttggtt

SEQ ID NO: 15095 - RNA, 100 nt, synthetic construct
  source 1..100: mol_type = other RNA
aattataggtgtaagacaggctttcccctaaaaataacatataacatactcgactagtggcaacagaaataactgaacatcgatatacttatctacgtta

SEQ ID NO: 15096 - RNA, 100 nt, synthetic construct
  source 1..100: mol_type = other RNA
ttatccgctacaacatataaaaatattatacacggtgtgaatcagtaacctgatcagtaaataatgaaagaagtagtattgatggtaatggggaatcgag

SEQ ID NO: 15097 - RNA, 100 nt, synthetic construct
  source 1..100: mol_type = other RNA
cggattagacgggcatttcctcataaacttgaaaattaaaataactgctccaaatccatattacacccaaagtaaataagcgtgaaatgaaggcagatcc

SEQ ID NO: 15098 - RNA, 100 nt, synthetic construct
  source 1..100: mol_type = other RNA
ggtcatacgagcctcgagatatgacaaataattataataccataccaaccagagttttaggcggttcatggagataatagaattaattcgttggatgtaa

SEQ ID NO: 15099 - RNA, 100 nt, synthetic construct
  source 1..100: mol_type = other RNA
actatacagaagaggaatgtggatttaaatcacgaagtccctatatatagagggatagagactaacccaaagtaaattaatgttagaagaaggcatattt

SEQ ID NO: 15100 - RNA, 100 nt, synthetic construct
  source 1..100: mol_type = other RNA
atagagaccaaggcccccagaaaatatcagggttcatgttagcaatatagactaaacaatattagaaaatcatcattctaaatatcaaaaacagccgggg

SEQ ID NO: 15101 - RNA, 100 nt, synthetic construct
  source 1..100: mol_type = other RNA
gggcaatggatccataccaattaataaatacacgggacaagatgatcaatgatcaggtgtcatagtttgtgcaataatgaaataataaaaatagccggct

SEQ ID NO: 15102 - RNA, 100 nt, synthetic construct
  source 1..100: mol_type = other RNA
gaccccgaaaggataatacacggcccttaataccagtaaatcattgtttgatttacacgtagaaatataacaaactaaaactagaattgcaaatatccgg

SEQ ID NO: 15103 - RNA, 100 nt, synthetic construct
  source 1..100: mol_type = other RNA
atttaaacgagcctcgtgatatgacaaattgaaaattcaaataactgctccaaatccataatacacccaaagtaaataagcgtgaaatgaaggcagatct

SEQ ID NO: 15104 - RNA, 100 nt, synthetic construct
  source 1..100: mol_type = other RNA
ataataataattcacacctaagaattacagttaataacaatcacctatctttctctagatggtcttgctcaatctcattttattaaaaataaagctgtga

SEQ ID NO: 15105 - RNA, 100 nt, synthetic construct
  source 1..100: mol_type = other RNA
ccacagccacgactcgatataagaatttttttgtattcgtcctccccctacgagaaaataaaaaagaaaaagtaaaacgatattcaacgatgggataggg

SEQ ID NO: 15106 - RNA, 100 nt, synthetic construct
  source 1..100: mol_type = other RNA
gttgaatcgacacatagcgataattcccgcttattcaaaaaatgcagcacagctccgaacaattatataacaatattaggtcataattgaatatttgagt

SEQ ID NO: 15107 - RNA, 100 nt, synthetic construct
  source 1..100: mol_type = other RNA
acggtattaatatactgaattagcccagaaaagcggagacggcagaacatattggattaaatatagtgacaacgtcgacatatggtcccgttacatgagc

SEQ ID NO: 15108 - RNA, 100 nt, synthetic construct
  source 1..100: mol_type = other RNA
ataaaaatcacctagggttgaaaataaaaaactgatccccacagcccttttgcgagataaataagcggtggagtcaaactgatgagggatgaaatattaa

SEQ ID NO: 15109 - RNA, 100 nt, synthetic construct
  source 1..100: mol_type = other RNA
ttacataagatcgtatttctaatagctctgcagttaactcagaatttacaaatatagcgatggcgttgatattggaagacgtccggtaataattaataga

SEQ ID NO: 15110 - RNA, 100 nt, synthetic construct
  source 1..100: mol_type = other RNA
taacataattaagtatttctaccagcctgagtaagtaaattagatgtatccaaaataaacgcgccgtcagtagtaagttaatagatataacgctaaatat

SEQ ID NO: 15111 - RNA, 100 nt, synthetic construct
  source 1..100: mol_type = other RNA
caggataatgttcatcctttctccatgaaataacaatatgagattaatattccagtaaaaattagactaatagaccggaggagacctccctgaagaaaca

SEQ ID NO: 15112 - RNA, 100 nt, synthetic construct
  source 1..100: mol_type = other RNA
taacataagtaatgacttccactatcaataaactctagggctcatatataaataataagtggaaggaaaaaagatggatcgaggtcgtcgctttcataag

SEQ ID NO: 15113 - RNA, 100 nt, synthetic construct
  source 1..100: mol_type = other RNA
agtttaaatacatgattcacttaatacaccttgtctcataaatcgttcataccaaaaaatccgagagtctagaggaggacttctcgaattaaaatattgt

SEQ ID NO: 15114 - RNA, 100 nt, synthetic construct
  source 1..100: mol_type = other RNA
tctaaaatataaaatcttaagatcaaaaacatgtccaaacatgcgctcgtgcaatcaaaatcgattacaaacatgctattcaaaatccagtgtgcgaaga

SEQ ID NO: 15115 - RNA, 100 nt, synthetic construct
  source 1..100: mol_type = other RNA
ttttgaatacccgaaaataagtccgacacttaataaaaggagattaatatcaatatgaagtaaccgtagcaggaaaggagataaagccataagtcgaatc

SEQ ID NO: 15116 - RNA, 100 nt, synthetic construct
  source 1..100: mol_type = other RNA
gagccctatattatacttctactacttatatagtaaactcaaattaatatcaataggtagtttataaaaaaagtgggaagaatcgcaacccgttcatcat

SEQ ID NO: 15117 - RNA, 100 nt, synthetic construct
  source 1..100: mol_type = other RNA
gttaacaaatatacgcaattaacgtaaagacactctgaggcttgtttacctcgttaaaatagaaacgtattacagtactatactgctcaccatataaatt

SEQ ID NO: 15118 - RNA, 100 nt, synthetic construct
  source 1..100: mol_type = other RNA
catgataatgttgatcccttctcgatgaaataacaagattcgattaatattccgctgaatattacttaaatagaatgatgaccacctcggtgaagaaaat

SEQ ID NO: 15119 - RNA, 100 nt, synthetic construct
  source 1..100: mol_type = other RNA
tcccccgttcccaaaaataatactgccaaccacgttaaagggcttccacccataatacacgacatataaaaatagggaagaaagataccactttcgtaat

SEQ ID NO: 15120 - RNA, 100 nt, synthetic construct
  source 1..100: mol_type = other RNA
aagggaggtgtgtgtgattataatatggcagagaaaaatcatggtttaattcatgattctacgatgagtcatatggaataaataaaagtaagatgtcatg

SEQ ID NO: 15121 - RNA, 100 nt, synthetic construct
  source 1..100: mol_type = other RNA
gaccttaatgttgatcccttctcgatgaaataccaagatgcaaataatattccattgaatataacattaatagactgatgtccaagctgatcagatgagg

SEQ ID NO: 15122 - RNA, 100 nt, synthetic construct
  source 1..100: mol_type = other RNA
gctaaaatacaaaatatcaagtaaatgcgggatgaccagtaacctccgtcgatccggccttacttagcgagcataaaataagaagcgactaatatctcga

SEQ ID NO: 15123 - RNA, 100 nt, synthetic construct
  source 1..100: mol_type = other RNA
agatttacagcaaaaaataaagttctcatacgaggaaaataacgtaggatacacccgacatacaaacatgtacctaagacatagacaatctgccggttga

SEQ ID NO: 15124 - RNA, 100 nt, synthetic construct
  source 1..100: mol_type = other RNA
actttaatacccataaataattcagactaccaacttagaaagttccggaataacatgacttataataattatttggcggaaataggcagggcacatgagt

SEQ ID NO: 15125 - RNA, 100 nt, synthetic construct
  source 1..100: mol_type = other RNA
taataactatgctagacgacaaaacgacttgtaagacgaaccgatgaatacaaaataaaaattagattaatagtctcctggagaccttcctgtaacaaaa

SEQ ID NO: 15126 - RNA, 100 nt, synthetic construct
  source 1..100: mol_type = other RNA
ttacataagatagcacatctcatatcaacactctctatgactcatatagaatccaaacacgaaatcaaaagacagggtacgaatctaaaagattaaaata

SEQ ID NO: 15127 - RNA, 100 nt, synthetic construct
  source 1..100: mol_type = other RNA
ctatcgaccctcgaataagttacagtcaatacacagatacattgtggatcaaatattaaagagatactaaaataggagagataaaccaaaggccatagct

SEQ ID NO: 15128 - RNA, 100 nt, synthetic construct
  source 1..100: mol_type = other RNA
tggcaaatagagataatcgaatcatactgagacgtggataagtatccaattttataaagaattagatacgtcaattctatgttatcctatacaacgcata

SEQ ID NO: 15129 - RNA, 100 nt, synthetic construct
  source 1..100: mol_type = other RNA
ttacattagatactgattttactcccaatagactagaggactcatctctcagtaaattctacaatgtcccatatgataaaaaaaattatatgccatggtt

SEQ ID NO: 15130 - RNA, 100 nt, synthetic construct
  source 1..100: mol_type = other RNA
ttacataagatagtctttatcatattaagaaatttgaatccctcactttcgataattctaaatattgttgtactgcccaagaatatacctgttcaaacat

SEQ ID NO: 15131 - RNA, 100 nt, synthetic construct
  source 1..100: mol_type = other RNA
tgacataattaactattcctcccatcttccataagtaaattagatgcatccagaatcaaaccgatcaatgatagcaattctctaatattaagtatattta

SEQ ID NO: 15132 - RNA, 100 nt, synthetic construct
  source 1..100: mol_type = other RNA
ttagaatctattggtgcttatagtatatatttgtaaaatcatatgattaccaatataaattcaccgtcagaagcgcggagatacattatatgccatgtga

SEQ ID NO: 15133 - RNA, 100 nt, synthetic construct
  source 1..100: mol_type = other RNA
tattagagtgattttatgattcctgtatatattcaaaagttcgaaatataaataattcctcgtaccgtaaacgccgaacacacaaaatatcccacgcata

SEQ ID NO: 15134 - RNA, 100 nt, synthetic construct
  source 1..100: mol_type = other RNA
taagaaaattaagtattcctcccagcttgagtaagtaaattagatgtatccaaaataaacgcgcctttagtagaaagtgaatagatatatcggtaaatat

SEQ ID NO: 15135 - RNA, 100 nt, synthetic construct
  source 1..100: mol_type = other RNA
gagcatatcattaaataaggaacaggaaattgactaaatcagatttataatagcctgaattttatcatataaaatctcccaagggacaggcgcgatagct

SEQ ID NO: 15136 - RNA, 100 nt, synthetic construct
  source 1..100: mol_type = other RNA
ccgcccaatattatatttctactaggaatattgtaaacacaacttaatattcgagcataaattacattaagagactcctgtacaactcctaatatctcgt

SEQ ID NO: 15137 - RNA, 100 nt, synthetic construct
  source 1..100: mol_type = other RNA
taaaagagtatcggcttgattcctgcatatattgctatactgaaaataaaaataatttatggttatgcagacgcgcagcacgaatactgtcgaataacga

SEQ ID NO: 15138 - RNA, 100 nt, synthetic construct
  source 1..100: mol_type = other RNA
tggaaatatctccttaccacttaatcaatcgtgttacgaagatgtccaattttataaagaattagataagtcaattctatagtatattatatcacgcata

SEQ ID NO: 15139 - RNA, 100 nt, synthetic construct
  source 1..100: mol_type = other RNA
agtgccataatatcaaattactctggcaatacaaagatacgctgttaatgctccttagaataaaagtgttgtccgtgaaaaaaagtataacactcaatag

SEQ ID NO: 15140 - RNA, 100 nt, synthetic construct
  source 1..100: mol_type = other RNA
agtttactacccacaaataattcagacaacataactagaatacccgccataggagaaaatactcagtctcacgaaaggacataaatccattagtcgagtt

SEQ ID NO: 15141 - RNA, 100 nt, synthetic construct
  source 1..100: mol_type = other RNA
taccatatattagtagatatactagctatacaatttaaacagatcacaacgaaaaggtggctcataaataaggagtgaagaagaatctaaccacgcgtgc

SEQ ID NO: 15142 - RNA, 100 nt, synthetic construct
  source 1..100: mol_type = other RNA
ccgcaccgaaatctcaaattatctcactgagccgatcaaaaataaactctgaaattacacgcaataaaaaaaaagggatcgaggtcgtccttttcataac

SEQ ID NO: 15143 - RNA, 100 nt, synthetic construct
  source 1..100: mol_type = other RNA
atagcaaaaatatcgaaagattaataaaataacgcccacaactcagatgtcaggatcaacacgtacactcacatctactaaattatttatatgcattcat

SEQ ID NO: 15144 - RNA, 100 nt, synthetic construct
  source 1..100: mol_type = other RNA
tacagatgttccggtttcctacagcatattcagataaatacaattaataaaggttaaaaatctatccatgcaaatctagcccaaaaccgtctgtaaatat

SEQ ID NO: 15145 - RNA, 100 nt, synthetic construct
  source 1..100: mol_type = other RNA
taacataattaagtattcctcctaaccagagtaagtaagttagatgtatccaaaataaacgcgccgtcactagaaagggaatatatatagcactaaatat

SEQ ID NO: 15146 - RNA, 100 nt, synthetic construct
  source 1..100: mol_type = other RNA
atagaaataacctgactcaaagcgtttatatactctgtgacaagttgagaaatataacgctcacattactaatattggatgttggaaaatgattacatag

SEQ ID NO: 15147 - RNA, 100 nt, synthetic construct
  source 1..100: mol_type = other RNA
cgacatccaccaaatatgactaaatcaatcgtgatacgatgatataataatggactgaatccgctctcataaaaattacacatgcgactctctagacaag

SEQ ID NO: 15148 - RNA, 100 nt, synthetic construct
  source 1..100: mol_type = other RNA
atagaaataacatgaatcaataatactcttatctacgatggtgtcatcgggaatataacttcgcagcagggatcgtgaaaaaaagaagaagtctacatat

SEQ ID NO: 15149 - RNA, 100 nt, synthetic construct
  source 1..100: mol_type = other RNA
tcccccgttcccaaaaaaaattctgacaagccagttaaaggggatgtaaagataaaaaactagatataaaaagagggtcggaagataccagttttataac

SEQ ID NO: 15150 - RNA, 100 nt, synthetic construct
  source 1..100: mol_type = other RNA
gtacataagagagtaagtgataaatattcatatccagggacataactgtcgagaactttatataattcagtagtgcgcaattagatacactcttacatgc

SEQ ID NO: 15151 - RNA, 100 nt, synthetic construct
  source 1..100: mol_type = other RNA
gaccataaccgaaaaattaaagctttcatctaacgacaaggataccgatacattaataactcgccgaaaaaaaagaacgaaataatcgaaacccatgccg

SEQ ID NO: 15152 - RNA, 100 nt, synthetic construct
  source 1..100: mol_type = other RNA
ctaacaacgatcaaatgacgaaaagtatatacaaagatacgctttgtgtgctaaataaaattaaagtgttgcctgtgaaacgaagtataacactaaatat

SEQ ID NO: 15153 - RNA, 100 nt, synthetic construct
  source 1..100: mol_type = other RNA
ttatataaattagtcctccattcaacgaaagaagatctccaaataacgctgaatctacaagcaataaaaaaatagggatcggggtcgtccttttcataac

SEQ ID NO: 15154 - RNA, 100 nt, synthetic construct
  source 1..100: mol_type = other RNA
ggacacaagagtcctataaaatataaaaacatgtcacgacaggcatttctaccattaacatcaattacaaacatagatccatttactaaaagttacatgc

SEQ ID NO: 15155 - RNA, 100 nt, synthetic construct
  source 1..100: mol_type = other RNA
ccatttaaatcacaaacaaagtccatgaataaacaacatgagattaataatcgagaaaaaattagattaagagaccggtggagacctcccttagtttaaa

SEQ ID NO: 15156 - RNA, 100 nt, synthetic construct
  source 1..100: mol_type = other RNA
agtataattccaataaaaaactctgaaaagacagtcaaaagggatcgaccgagaaataactagataaaaaactagggtgggaagataccagttttataac

SEQ ID NO: 15157 - RNA, 100 nt, synthetic construct
  source 1..100: mol_type = other RNA
taattactacccggagttcaaggagtacgagtagagccataatatttaattcctgacataagtaatacaattcagtgatatactgttaaccatgtaaatg

SEQ ID NO: 15158 - RNA, 100 nt, synthetic construct
  source 1..100: mol_type = other RNA
aactcaataatacgaaaatcctagaaaataccacgtcgatgcgaatcatcgaaaatcaatgggtaatatatcgatgaatttatgagagtaagagtacatt

SEQ ID NO: 15159 - RNA, 100 nt, synthetic construct
  source 1..100: mol_type = other RNA
gcgagaactttccggggtatacccccaacgccctcggtgactcaaatataaatatagcgattgggtagtttatattagacaacggtaaataataaaatca

SEQ ID NO: 15160 - RNA, 100 nt, synthetic construct
  source 1..100: mol_type = other RNA
tgtaatataataaatcccaagctcaatcgagatttgcaccaaaggaatatctatgaaatatttaatgcagtatagagtaacgaactgtgtaaattccgga

SEQ ID NO: 15161 - RNA, 100 nt, synthetic construct
  source 1..100: mol_type = other RNA
atagttaaatcaaaaattaagtttacaaaacaaggagaataaatttggataaacgggcatcctatcatatagactcaccatacgtttattagctcttggg

SEQ ID NO: 15162 - RNA, 100 nt, synthetic construct
  source 1..100: mol_type = other RNA
gggctaatagacaaaatcgtagctttaatataacgacaatcagacgcatcgaaaataaacagcaaaaaaaaatagggttcgaggtcgaccttttcatatc

SEQ ID NO: 15163 - RNA, 100 nt, synthetic construct
  source 1..100: mol_type = other RNA
ggatttactgcaaaaaatattgttactattatcgacgatggcgtcatatctaatattaattagcagtatgtaaagcggagatagattctctgccaaccag

SEQ ID NO: 15164 - RNA, 100 nt, synthetic construct
  source 1..100: mol_type = other RNA
ggttggactaacgttgtgctacctatacatattcataatctaaaaataaataatataaatttgcagtaacgtagctggacagagatcagcatggatctgg

SEQ ID NO: 15165 - RNA, 100 nt, synthetic construct
  source 1..100: mol_type = other RNA
atagtaatattgggtgattataatataacttagtaaaaactgattattgtcaatatgaagtcactgtcgaaagaaacgagattaacccataagtcgagta

SEQ ID NO: 15166 - RNA, 100 nt, synthetic construct
  source 1..100: mol_type = other RNA
caccataataaagtactcctcccagcctgagtaagtacatcagatgtatactaaataaaaattagattaatagtctcctcatcaggaaatacgtttgtgc

SEQ ID NO: 15167 - RNA, 100 nt, synthetic construct
  source 1..100: mol_type = other RNA
tacgagagtcttgatcctttctccatgaattaactaaatgagattagtattccagaaaaaaataaattaagagactggtgaagaacacacttaagaaacc

SEQ ID NO: 15168 - RNA, 100 nt, synthetic construct
  source 1..100: mol_type = other RNA
tctcccgctcaaaaaatcaataatactcttatcgatgttggagtcataaggaatattacttcacagttgggatcgtgaaaaaaagtattaggctaaatat

SEQ ID NO: 15169 - RNA, 100 nt, synthetic construct
  source 1..100: mol_type = other RNA
gctaaaatacaaaataccaagttaaagcgggaagatcaataacctccgtagacccggcatcacttagccagcataaaataagaagcaactaatatctcga

SEQ ID NO: 15170 - RNA, 100 nt, synthetic construct
  source 1..100: mol_type = other RNA
aattgaaggaccagcttggttcctgaatatattcctatactgaatatataaataatgtatgattatgcagacgcgcagcccgaatactcatcaccaaagg

SEQ ID NO: 15171 - RNA, 100 nt, synthetic construct
  source 1..100: mol_type = other RNA
tctaaaatataaaatatcaagttcagcaattattcaagcagtctccccttaaaatcatagtctatcattgcaaaacaccccaaaatttgtcgctaaatat

SEQ ID NO: 15172 - RNA, 100 nt, synthetic construct
  source 1..100: mol_type = other RNA
gcccataataaagtactcatcccagcctgaataagtaaatcaagtgtagccaatataaaggggccgctactagaaaatacatgaggaaataccttttttc

SEQ ID NO: 15173 - RNA, 100 nt, synthetic construct
  source 1..100: mol_type = other RNA
cgatgtagagactacgtaaatagagtacagtcgatctctaaaaatgtagcctacctacatatatgatattacgggaaagctaataaagactagtaaatac

SEQ ID NO: 15174 - RNA, 100 nt, synthetic construct
  source 1..100: mol_type = other RNA
aatctacttataaataaactcgaaggctatataagttacctatactggattttttaagtacaaagtttttagctgacagtaaattaaaatcaatcaatcg

SEQ ID NO: 15175 - RNA, 100 nt, synthetic construct
  source 1..100: mol_type = other RNA
aaaataattagaaatctcgaccggcgagcgacaactttaacactacggtgcacccgaactaatatagaatagtacatgaattcgaaattttacaaaatac

SEQ ID NO: 15176 - RNA, 100 nt, synthetic construct
  source 1..100: mol_type = other RNA
cgatgtagagaatcagatgcaaagaagatcataaatattaaatgacgtagaattttgatgaggagttctattaatacggataagtacagttacgcaatat

SEQ ID NO: 15177 - RNA, 100 nt, synthetic construct
  source 1..100: mol_type = other RNA
gcgacacatacatataaagggatagaaaaactaatatatggatacttaaggtgtttcatgttaagatattgcgggataaattattttccggaaacggaaa

SEQ ID NO: 15178 - RNA, 100 nt, synthetic construct
  source 1..100: mol_type = other RNA
aaaatatatagattccatccgcattaggcacagagatgaagtcgtgtaggctacatgcatatattatataccgggaaactcaagtaaaaccagttaaaat

SEQ ID NO: 15179 - RNA, 100 nt, synthetic construct
  source 1..100: mol_type = other RNA
gcgacacatggatataaagccatggttaaaataaaatatcaatagttacggtgtttcatgataagattttgcttgacaaattaattgacggatacgcagt

SEQ ID NO: 15180 - RNA, 100 nt, synthetic construct
  source 1..100: mol_type = other RNA
aagataaataaatcccatgcagatcaggtaaacagaggacccgagtagttaaaaaatcctatatgatactgggatatcaattcgaaattttaaaacattc

SEQ ID NO: 15181 - RNA, 100 nt, synthetic construct
  source 1..100: mol_type = other RNA
gctagatgagtatgtaatcgatagaaataatatttaggtaccaagaagagataaattaagtcacgaactaaaaaggtagaacatatctcttcgtgaggaa

SEQ ID NO: 15182 - RNA, 100 nt, synthetic construct
  source 1..100: mol_type = other RNA
gcgacacatggatataaagcgatagttaaaataatatatggataattaaggtgtttcatgataaggtattgcgggataaattattttccggagacggagt

SEQ ID NO: 15183 - RNA, 100 nt, synthetic construct
  source 1..100: mol_type = other RNA
aatttatataatgtcgatgtgcatatataatatttatgttccgagaaactagacacacaactatgattttacaggaaaatcatgtaaaaccagtcaatac

SEQ ID NO: 15184 - RNA, 100 nt, synthetic construct
  source 1..100: mol_type = other RNA
cgcgctccaatactattggatcatgtcgatggataagttaagtagaaacgaatcaatcctatatgataatatggaaaaaaaaagtaaaatcaattactca

SEQ ID NO: 15185 - RNA, 100 nt, synthetic construct
  source 1..100: mol_type = other RNA
aacgaggatagctggtccgatataataacgattaaatatcaaagctgggattatttgattttaaattcgtcggtgtcaactagtagaaacaattaaatag

SEQ ID NO: 15186 - RNA, 100 nt, synthetic construct
  source 1..100: mol_type = other RNA
aagaaggaataatggtctcattagataacgattaaatatcgatacagacgtgggctgaggatgacgatctggatatattgaaggcagtctaatattacaa

SEQ ID NO: 15187 - RNA, 100 nt, synthetic construct
  source 1..100: mol_type = other RNA
ctacgtgacgaaacagaaggagagaatatccagctatatagacagactagagctctgacgttaaaatttccggtgacaacaaaaaaatactcgtcaataa

SEQ ID NO: 15188 - RNA, 100 nt, synthetic construct
  source 1..100: mol_type = other RNA
agtatttacgactaataaatgcagaattaaaatatacaaccggcaatggggccgcataggtgattgacgataaagcgtacaaataattaggaacacagca

SEQ ID NO: 15189 - RNA, 100 nt, synthetic construct
  source 1..100: mol_type = other RNA
cgtatctaaaaaccaatctaagatggctctgtttatattctcactgtctgcgaataatataaattacaatagtagtccggatacaattctaagtaacata

SEQ ID NO: 15190 - RNA, 100 nt, synthetic construct
  source 1..100: mol_type = other RNA
actatatggtgaagtagatagttaatataaaaaattatcctatccgaactaatctcgctccttgcagaaaatgaatccacgaccatatagcaatcaagat

SEQ ID NO: 15191 - RNA, 100 nt, synthetic construct
  source 1..100: mol_type = other RNA
tacgtactcataaataaagtcgaagtatatataagtgagatatcctgtacttttttaatgttaagttcatagctgacacaaaattaaacttagtcagcag

SEQ ID NO: 15192 - RNA, 100 nt, synthetic construct
  source 1..100: mol_type = other RNA
agtctacttataaataatcagtatcagggacggagattaagcattatcggagacatccaaatatcgttttaaatgattgcatattaaaattagtcaatac

SEQ ID NO: 15193 - RNA, 100 nt, synthetic construct
  source 1..100: mol_type = other RNA
ctatagtccacggggtacggctaaaaagaaaatccagaaaccatgaagaaatatgtaaaggcatcaactatacagagatatactagagcaaaaacatcca

SEQ ID NO: 15194 - RNA, 100 nt, synthetic construct
  source 1..100: mol_type = other RNA
taattaactagaaatatggacaaaccgaagacaaattttagaaacataataaccggatgattgacgttttgattcccagacgaaagaaacgagagaacaa

SEQ ID NO: 15195 - RNA, 100 nt, synthetic construct
  source 1..100: mol_type = other RNA
aagatcattgtacataaaggaggaagccacgcttcgaagacctgaccaacgtgatttaaacatgttatactttgacatatatcaaatataagaaatcatc

SEQ ID NO: 15196 - RNA, 100 nt, synthetic construct
  source 1..100: mol_type = other RNA
agagcagaaggatcaaatcggtagaaactggatttattactctaaaagatataaatttacccaaggatgtagtataaataattaggacatgtcatgatct

SEQ ID NO: 15197 - RNA, 100 nt, synthetic construct
  source 1..100: mol_type = other RNA
accccatgaatagtaatagatggaatttaagatcaactctcgtcctacctaaaagtgtaaaaccatatactgtgacaaatatacaaaaacaaagcaataa

SEQ ID NO: 15198 - RNA, 100 nt, synthetic construct
  source 1..100: mol_type = other RNA
tcaaaatgaaagacacaattgattatattaaaaattatcctatccgatctaatctggctccttgaagaaaatgaaaccacaacaattattattaacctag

SEQ ID NO: 15199 - RNA, 100 nt, synthetic construct
  source 1..100: mol_type = other RNA
ctattatgataatacgtatataatttcaagtagatatctaaaactatattgacattattatcctttagaaatggtcgtgaaacgggccggttatatacat

SEQ ID NO: 15200 - RNA, 100 nt, synthetic construct
  source 1..100: mol_type = other RNA
ctcttgtattatgtcagtaggcccctaaaataatatattgaggaagaatcctagatattaatttcgacaacagacatagttaggagagcgaaattaatat

SEQ ID NO: 15201 - RNA, 100 nt, synthetic construct
  source 1..100: mol_type = other RNA
aatatatggtgaccagactaagatgcctctgtccgtactccaaatatagttcagtaatataaaatagaatagtactccggaaacaatcctaagtaacatt

SEQ ID NO: 15202 - RNA, 100 nt, synthetic construct
  source 1..100: mol_type = other RNA
cgcgtttacgcctaataaatgcagaattaaaatatagttaagtaaaaactaaatagtgatatttgatatgattgtcgaatttattagcacgagtcagtaa

SEQ ID NO: 15203 - RNA, 100 nt, synthetic construct
  source 1..100: mol_type = other RNA
ccataacatacacacccgctctttagttaagatttacgtgccaagaagctataggttaaaataccgttgaagaagctcggaaaatatatatgtacaataa

SEQ ID NO: 15204 - RNA, 100 nt, synthetic construct
  source 1..100: mol_type = other RNA
cgtatctaagaaccaaattaacccggcgagttagcgtagtcatatttacattacatatttatttcgacaaaagaaatatttagcagggcaaatacataca

SEQ ID NO: 15205 - RNA, 100 nt, synthetic construct
  source 1..100: mol_type = other RNA
taagaataaggttcatatcagtatctggcatagatatgaacccatgtatgtagcgtgtggctcatttgacataaatgtataaaaaatatcaattcattat

SEQ ID NO: 15206 - RNA, 100 nt, synthetic construct
  source 1..100: mol_type = other RNA
tgtgagtccactgcgactcactagaaataatattgctaaacccatgtatgtgtcgagaatgcatagcatattaatacatataattgaattcactatacaa

SEQ ID NO: 15207 - RNA, 100 nt, synthetic construct
  source 1..100: mol_type = other RNA
accatatggtttactagatagctaatataaaaaattatcctatccgatctaatctcgctccttgaagaaaatgaaaccaccaccataaagcaatcaagat

SEQ ID NO: 15208 - RNA, 100 nt, synthetic construct
  source 1..100: mol_type = other RNA
ggtattgactactaactatatagaaaataatattaagcaagcgtcgtggcaaaatagacggtgagtccatgacatcgtgaagagagccgatgatatacaa

SEQ ID NO: 15209 - RNA, 100 nt, synthetic construct
  source 1..100: mol_type = other RNA
aaagaataaggttcatatcagtatctgacatatttattaacccatgtatgtggcgagaggctcattggacataaatgtataaaaaatatcaactcgtttt

SEQ ID NO: 15210 - RNA, 100 nt, synthetic construct
  source 1..100: mol_type = other RNA
gttaatgacgcccaaataaatttgctaaaataatatatggagcaacgagggccgcttagcagattgagggaattccgtggaaataattctgaagaaagta

SEQ ID NO: 15211 - RNA, 100 nt, synthetic construct
  source 1..100: mol_type = other RNA
aacgaggatcgctgctacgatataataacgattcaatatcaaaaagcgtcctagattatatgattaatggaatagcgtagaaataattaggaacacagca

SEQ ID NO: 15212 - RNA, 100 nt, synthetic construct
  source 1..100: mol_type = other RNA
gtcttccaataagtctgagcatctgcataaaatttagtaacctcattaaattaagtatgccatagaaataagcttacgctaaattaaaatcaatcaatcg

SEQ ID NO: 15213 - RNA, 100 nt, synthetic construct
  source 1..100: mol_type = other RNA
taattaactagaaatatggacaaactgaagacaaattttatcaggtagatatacatcaagggctcgattattaatacctataatcataagccctctgcca

SEQ ID NO: 15214 - RNA, 100 nt, synthetic construct
  source 1..100: mol_type = other RNA
gctccatgaagagtaatagattgaatttaaaaacaactctcgtgctatctaaaagtgtaacaccatatacggtgacaaatatacaaaaacaaagcaataa

SEQ ID NO: 15215 - RNA, 100 nt, synthetic construct
  source 1..100: mol_type = other RNA
aatatatggtgcagcacaagttaaaaaaaatattaattaatcgcggtggcaacatagactctgtatccattaaatcgttaagagggccggtattatttat

SEQ ID NO: 15216 - RNA, 100 nt, synthetic construct
  source 1..100: mol_type = other RNA
actgacgaaacgtcttatcgttagaaataatattaagtaccctcttgaaaataagtatacgctaaagatattgaagaaacaactttagaatgcatatcaa

SEQ ID NO: 15217 - RNA, 100 nt, synthetic construct
  source 1..100: mol_type = other RNA
taattatataatgtccttgcgcatatataatatttacgtcccggcaatctagacctccatcgaattacgtacaggccaaattaacttccggacagaattc

SEQ ID NO: 15218 - RNA, 100 nt, synthetic construct
  source 1..100: mol_type = other RNA
tataagtccacggcgtcgcgctagaaataataatgccaaacccatgtatgggtcgagaacgcttcgaatattaatacatataattataatcagtatacaa

SEQ ID NO: 15219 - RNA, 100 nt, synthetic construct
  source 1..100: mol_type = other RNA
aagtgatatcttttgcttgtgaatacataatatttatggtccgagatacttgtttgaataatacgtttttagccgaccgaaaattaaaataacgacaatc

SEQ ID NO: 15220 - RNA, 100 nt, synthetic construct
  source 1..100: mol_type = other RNA
aacgacgaaacgtcttatcgtaaaaaataatatttagtaacctcttgtaaataactacacgctaatgatattgaagaaacaactttaaaatgcatatcaa

SEQ ID NO: 15221 - RNA, 100 nt, synthetic construct
  source 1..100: mol_type = other RNA
aaaagaactatctctgacgataaagagctacagagataaaaacagttaaataaagaaatagagcgctattattagtaacgacaatctaccaagtcaaaca

SEQ ID NO: 15222 - RNA, 100 nt, synthetic construct
  source 1..100: mol_type = other RNA
tggctatatgtatataattaggaaagggctcagggaggaagatatataggagacactctcttatgacattcccgaagaatcaagtgaaaagagtaaatat

SEQ ID NO: 15223 - RNA, 100 nt, synthetic construct
  source 1..100: mol_type = other RNA
tatatgtgctaatcagagtagacgggcgagtcagcgtagtcatatttacattacatattaatttcgacaaaagaaatatttggaaggagaaatacataca

SEQ ID NO: 15224 - RNA, 100 nt, synthetic construct
  source 1..100: mol_type = other RNA
agagcagaaggatcaaatcgccagaaactggatgtattactcaataacatatacattaacccaaggatttagtataaataattatgacatgtcatgatct

SEQ ID NO: 15225 - RNA, 100 nt, synthetic construct
  source 1..100: mol_type = other RNA
tgactaccatcctacggagacgcagagtagatcattgcctataaatattaacgataatagaactggttagagtatacataagtacagaaatttaagatat

SEQ ID NO: 15226 - RNA, 100 nt, synthetic construct
  source 1..100: mol_type = other RNA
agagccgaaaaaccaaactaacgcggccaggaagcgtagtcatatttacattaatttaaaatacgcatttagtatacttaataagataaaatgacaaaaa

SEQ ID NO: 15227 - RNA, 100 nt, synthetic construct
  source 1..100: mol_type = other RNA
aagatatataaattcgggccgtattaggaggggctaattgagtaagattcctagatattaattctcacaatacaatcattcaattaaaacttgttaattt

SEQ ID NO: 15228 - RNA, 100 nt, synthetic construct
  source 1..100: mol_type = other RNA
aagataaataatttccatgcgcagtaggtacagacatgaagaaatgcaggcgacatagacatacgataccaaaggaaaatcaagtataatgttatatatg

SEQ ID NO: 15229 - RNA, 100 nt, synthetic construct
  source 1..100: mol_type = other RNA
aagctattaaaattcgagccgttttatgcgtggcgaagaagatatatagaagactcacacattgagacaatagaaatatttagcggagcaaaatcataca

SEQ ID NO: 15230 - RNA, 100 nt, synthetic construct
  source 1..100: mol_type = other RNA
ggttagtaaggcccgacctagctggtagaagaaaagattgactaagaactaaataatgatacatcataatatggcaaaatcaattatttattaggaaaac

SEQ ID NO: 15231 - RNA, 100 nt, synthetic construct
  source 1..100: mol_type = other RNA
cgacaggtaggcccgcgcaagatggtaaaagaataaattgactaagaactaaataatgacgaaacataatatgggaaaatcaattatcacaactcaacat

SEQ ID NO: 15232 - RNA, 100 nt, synthetic construct
  source 1..100: mol_type = other RNA
tgaatttagaaactattatggaaagtctatataatatcggtatacttccgttttataatcgtatgatattattggcaactataatatgtcgtgttaatat

SEQ ID NO: 15233 - RNA, 100 nt, synthetic construct
  source 1..100: mol_type = other RNA
tatatagacacgacttacccgtattgcgcccaccgaacaagaaatatagtcgacacatacctacgaagtccccggaaaataattaagaacaaattaataa

SEQ ID NO: 15234 - RNA, 100 nt, synthetic construct
  source 1..100: mol_type = other RNA
aataaagagacctgttacgattaacccctatgcagataagaatccagatagtatatactatccctgaaacatatatgggcaattagcaacaaattaatag

SEQ ID NO: 15235 - RNA, 100 nt, synthetic construct
  source 1..100: mol_type = other RNA
gttttccattaagtgagagaagctgcataatatttagtaacctcattagattaagtatatcatagaaataagcttcccctaaattaaaatcaatcagtct

SEQ ID NO: 15236 - RNA, 100 nt, synthetic construct
  source 1..100: mol_type = other RNA
accgcaaataagctcaatgcgaaatacgaaggaacgttaaagtaaaaactttacatattaatttcgacaaaagaaatatttggcacgggaaatacgtaca

SEQ ID NO: 15237 - RNA, 100 nt, synthetic construct
  source 1..100: mol_type = other RNA
aacatgataataaatcttgtccgtggatgcataaacaaaacccttaagaaacatgttaaggcatcatctatacagacatatactagagcaaaaacatcca

SEQ ID NO: 15238 - RNA, 100 nt, synthetic construct
  source 1..100: mol_type = other RNA
tggctatatgtatataaatacgttagggctcagggaggaagccatgtatgtgtcgagaatgcatcgaatattaatacatataattttaatcagtaaacaa

SEQ ID NO: 15239 - RNA, 100 nt, synthetic construct
  source 1..100: mol_type = other RNA
gcgacacatcgatctaaagcgctagttaaaataatatatggatacttaaggtgatttaaaatacgagtttagtatacttaattagataacttcacaataa

SEQ ID NO: 15240 - RNA, 100 nt, synthetic construct
  source 1..100: mol_type = other RNA
aaattacctaaggtccttgtgaatatacataatttatgttgcgagaaacttgagccacacaaatcataatatacgaaaatcatttatctcaattcaacat

SEQ ID NO: 15241 - RNA, 100 nt, synthetic construct
  source 1..100: mol_type = other RNA
tcttagtccactaggtagcgctagaaataatattgagaaagcaggtaaatatacgtgaaggcatcgactattagtacatataattataatctcatgatcc

SEQ ID NO: 15242 - RNA, 100 nt, synthetic construct
  source 1..100: mol_type = other RNA
agaattaacgactaaataaacgttctcaaataatataagcatcaactcgggccgcttaggtgattgacggtttagcgtacaaaaaattatcaacacagca

SEQ ID NO: 15243 - RNA, 100 nt, synthetic construct
  source 1..100: mol_type = other RNA
gaagtaacaacctaatacgagatcctaaattaataaatttagtagttaaatattttgtcgttattatcgaatcaaagagaatagcggtgtaatccagaac

SEQ ID NO: 15244 - RNA, 100 nt, synthetic construct
  source 1..100: mol_type = other RNA
tatatacacacgactgaaggagaacgcaactattagaatacccatatagtcgacacaaagttacgacgtccccggaaaataattaagagcaaattaataa

SEQ ID NO: 15245 - RNA, 100 nt, synthetic construct
  source 1..100: mol_type = other RNA
tttatttatgaatttaaatggtaattctatataatatcggtgtacttacgttttactatgttaggatattagtatacttaattaggataatagccaaatc

SEQ ID NO: 15246 - RNA, 100 nt, synthetic construct
  source 1..100: mol_type = other RNA
aagataaataaattctcgcgctagaaataatattgccagagccatgtaggtgtcgagaatgcatcgaatccccggaaaatcaaaaaaaactagagtacgc

SEQ ID NO: 15247 - RNA, 100 nt, synthetic construct
  source 1..100: mol_type = other RNA
aaagaaaataagtttgatgatttttagtcacagagatgtagaaaaataggtgacataaatttacgcttttccctgagactcaagtaaatcgagagaatat

SEQ ID NO: 15248 - RNA, 100 nt, synthetic construct
  source 1..100: mol_type = other RNA
cgggggcaaacatctttaaatagaaaataataccgaacaagaaatatagtcgccacatacctacgaagtccccggcaaaaagagtctagattatatacct

SEQ ID NO: 15249 - RNA, 100 nt, synthetic construct
  source 1..100: mol_type = other RNA
aatttggaaaaaccgaccaagctggtagaagaatagattgactaagaactaaataatgatacatcataatatgggaaactcaattatttattaggaaaac

SEQ ID NO: 15250 - RNA, 100 nt, synthetic construct
  source 1..100: mol_type = other RNA
gagctattaaaattcgagccgcgttctgcgtggcgaagaagatatatagaagactcacacattgtgacaatagaaatatttagcggagcaaaatcataca

SEQ ID NO: 15251 - RNA, 100 nt, synthetic construct
  source 1..100: mol_type = other RNA
tatatgaagtaatcagattagacgggcgagtcaatgtggtcatatttacattacatattaatttcgacaaagtatacataagtacagaaatttaagagat

SEQ ID NO: 15252 - RNA, 100 nt, synthetic construct
  source 1..100: mol_type = other RNA
tacctactcataaataatttcgaagtatatatcaataagatatcctggacttttttaatgttaagtacttagctggcacaaaattaaactcaggctgcag

SEQ ID NO: 15253 - RNA, 100 nt, synthetic construct
  source 1..100: mol_type = other RNA
aaaatgataagaaatctggtccgtagatagacaatcaaattattacggatgcgggtccatatacaacagaatgatacataaaaaaatagcaagtcgttgt

SEQ ID NO: 15254 - RNA, 100 nt, synthetic construct
  source 1..100: mol_type = other RNA
tatatcaacgaactatttttgaaaaaaattccagccatatacgattattctcatctctataaatcagaatagtagttcggaaacgatccgtagtgacatg

SEQ ID NO: 15255 - RNA, 100 nt, synthetic construct
  source 1..100: mol_type = other RNA
agtattcatgacttactatatagaaaataataataagccagcggagtggtaatatagacggtggatccatgaaatcgttctgagtgcccatgatatacat

SEQ ID NO: 15256 - RNA, 100 nt, synthetic construct
  source 1..100: mol_type = other RNA
taaatcacaagaaattacagaagattacactggccatctaaatatatcttaaccggcatcatctagtttgttaatacttattattatatccactctacct

SEQ ID NO: 15257 - RNA, 100 nt, synthetic construct
  source 1..100: mol_type = other RNA
taattccttataaatacgcgatagaaataatacttacctgtcgataatgtacatgtgaatagatcgtcgaaaggccttagatcatatactagtaatctag

SEQ ID NO: 15258 - RNA, 100 nt, synthetic construct
  source 1..100: mol_type = other RNA
gttttcccttaagtctgagaagctgcataatatttagtaacctcattaaaataagtatacgatagacataagcttacgctaaattaaaatcaatcaatcg

SEQ ID NO: 15259 - RNA, 100 nt, synthetic construct
  source 1..100: mol_type = other RNA
cccgcaaataaactcaatgcgaaattcgaaggaccgttaaagtaaaaactttacatattaactgcgacaaaagaaatatgtggcacgggaaatacatacg

SEQ ID NO: 15260 - RNA, 100 nt, synthetic construct
  source 1..100: mol_type = other RNA
aaaaataataacttcatgacatacattgaatataaaatcagcgcgaactcgttacagccatcctgatctaaatatcagtacatccccgccaaaacagttg

SEQ ID NO: 15261 - RNA, 100 nt, synthetic construct
  source 1..100: mol_type = other RNA
aagtacaaataactcttaatcatgttaccccgtataagttaataatgtcatgcataaaaactggcagcagacattatattaatctatcaacctcgatata

SEQ ID NO: 15262 - RNA, 100 nt, synthetic construct
  source 1..100: mol_type = other RNA
tgacaaacattgattgtaaaaactataatccaccaaagccgagactatccaagaataaaaaataaattttcgagttgtactctatattatgtttgatgcc

SEQ ID NO: 15263 - RNA, 100 nt, synthetic construct
  source 1..100: mol_type = other RNA
gacgaaaaataaatctgcactatggctgccggctagactaaaaaacttattcaattcctaaataggaaatgaaaaataatacgaggacacctgcgaatga

SEQ ID NO: 15264 - RNA, 100 nt, synthetic construct
  source 1..100: mol_type = other RNA
acttgccataatattgtaaaaacaataatccacctaaggacattctggcacttaatccggagtacgccagaatataaactgatatataacagtaatacac

SEQ ID NO: 15265 - RNA, 100 nt, synthetic construct
  source 1..100: mol_type = other RNA
gcgcaaataaaaaattaaaatatgtcagccggctagactaaaaaacttattcaatgccaaaataggagatgacaatttatatgaggttaccggcgaatga

SEQ ID NO: 15266 - RNA, 100 nt, synthetic construct
  source 1..100: mol_type = other RNA
taatacccttgaggagataactgaagtggattactaataaaatataatatggaacttcatgacagtgcggagataataagtatgtggtctaaatgatgca

SEQ ID NO: 15267 - RNA, 100 nt, synthetic construct
  source 1..100: mol_type = other RNA
tactaccctaaaagagatacctgtcttggattactactaaaatataatataggacttcaagacagagcggacataataagaatgtggtctaaattttgca

SEQ ID NO: 15268 - RNA, 100 nt, synthetic construct
  source 1..100: mol_type = other RNA
gcagaaatatgaatcaagaaatatctcaagggtaatatgatttagtttcacaaaatccggagtgcgtcagaatataaactcagataaaatcgtaatgcac

SEQ ID NO: 15269 - RNA, 100 nt, synthetic construct
  source 1..100: mol_type = other RNA
agagtacttgaaaaatgaatatgatctccattaactagtataaactgaatcctaaaatctgtgttacacgatctaataatacaatgaaagaatctaactg

SEQ ID NO: 15270 - RNA, 100 nt, synthetic construct
  source 1..100: mol_type = other RNA
gaattggatcccctgttcatatatattcctccaataattacaaaaataattctaccacctatcttgctactggaattgtgaattataaaatgaatgacga

SEQ ID NO: 15271 - RNA, 100 nt, synthetic construct
  source 1..100: mol_type = other RNA
attttttaaaggactttatatcagcggaaataaaaaataagtgacctcagcgcaataaggccattgggcagagccaaaataattccgatgtaattacagc

SEQ ID NO: 15272 - RNA, 100 nt, synthetic construct
  source 1..100: mol_type = other RNA
acgtaaaaaaaaatctccacgatctatagcgagatatgatacgaattactccttcgatggctctgatctaaatatgcgttgttctctgccaaaatattag

SEQ ID NO: 15273 - RNA, 100 nt, synthetic construct
  source 1..100: mol_type = other RNA
tgaggaattaaaaatttaatacaagtaacacagcattacgtggggagccaatatatattattaacatatgcaatcagtattccacatatttaagtttgag

SEQ ID NO: 15274 - RNA, 100 nt, synthetic construct
  source 1..100: mol_type = other RNA
gctcaaagataaatgttgatacatatcactcgcttatagaaataacgcatgagaaaaactgacgaatatcaatatatcagaatttttctattacgcccct

SEQ ID NO: 15275 - RNA, 100 nt, synthetic construct
  source 1..100: mol_type = other RNA
gcgcaaatgtgagtcttgatatattttcaatataaaatcggcgagaactccggctgattccaatataggtgggaataaatatctttcatcataaattgaa

SEQ ID NO: 15276 - RNA, 100 nt, synthetic construct
  source 1..100: mol_type = other RNA
gggatagtgaaaaaaagttaaattcgtatagattcgacgaattttgaacattgaaaagacataatataataccttccaatactaaggcagtagcggtgta

SEQ ID NO: 15277 - RNA, 100 nt, synthetic construct
  source 1..100: mol_type = other RNA
ttatacgtgcggagtctaattggctataaaaatatattaaggtgccgcatggcaaaaatcatataaacacaagaatggaggcgtagaaaaaatagccctt

SEQ ID NO: 15278 - RNA, 100 nt, synthetic construct
  source 1..100: mol_type = other RNA
gaggaaggataatattatactatagggcttacgagacgaacgaacgaatacaaaatgcgtagggaagcttcatgatgattatcagaatataatttatata

SEQ ID NO: 15279 - RNA, 100 nt, synthetic construct
  source 1..100: mol_type = other RNA
tcctaccctaaaagatataactgacgtaaataaaaaataagtgacctcatcggaaaacgggcattaagcagagccaaaataagtctgatgtcatgagagc

SEQ ID NO: 15280 - RNA, 100 nt, synthetic construct
  source 1..100: mol_type = other RNA
aacaaaaatccatttattttgagaagtccaagtttatagaaatgacgcctgcgaaaaaataataaattccagacgatatatcggcgctccactagacgaa

SEQ ID NO: 15281 - RNA, 100 nt, synthetic construct
  source 1..100: mol_type = other RNA
gacgaaatataaatcttgacacacgctgtatataaaaaaagcgagaattagggctgaatcccagctaggagtcataatccaaaaaggcatacatgggata

SEQ ID NO: 15282 - RNA, 100 nt, synthetic construct
  source 1..100: mol_type = other RNA
atacacgtgcgtattctaattggctataaatatagattgaagaggcccacggcaaaaatcctcccatttatgaagataaggattataaaaaaaagccgtg

SEQ ID NO: 15283 - RNA, 100 nt, synthetic construct
  source 1..100: mol_type = other RNA
gtatgaatcatatattatactatagggcgtaatgttagtgggccggccccaaatatatccgtgttacacgatctaataatacaatgaaagaatctaaccg

SEQ ID NO: 15284 - RNA, 100 nt, synthetic construct
  source 1..100: mol_type = other RNA
gctcaaaataatatcatacaaatgatctggtataatgtgtaacaatccgactaaatccgaaacgagtcttaattatttcttataaattagtatcccacca

SEQ ID NO: 15285 - RNA, 100 nt, synthetic construct
  source 1..100: mol_type = other RNA
gcagaaatatcaatcatgacatatcctgattataaaacggcgatataatcgggctggattccatcgatcaggaaatacttttgttgcgaaataatttcca

SEQ ID NO: 15286 - RNA, 100 nt, synthetic construct
  source 1..100: mol_type = other RNA
ggaggaattaaaaatatagggttatgatgttataaatagtcaaaatcactgagttagcccttgagtaaatgacatcaagtgatataagacaatcttggcg

SEQ ID NO: 15287 - RNA, 100 nt, synthetic construct
  source 1..100: mol_type = other RNA
gtcgcaattacaaatttaataccagtaagacaccgctaatggcggggccaaaatatattattaacataaactgtcaatattcccaatattgaagtgggag

SEQ ID NO: 15288 - RNA, 100 nt, synthetic construct
  source 1..100: mol_type = other RNA
gaggaacgaatcaaaatatatttggacagatataataagggcgagaagtcaacatagacctagaacatatgacgttatacaaaaaggcactctcccgata

SEQ ID NO: 15289 - RNA, 100 nt, synthetic construct
  source 1..100: mol_type = other RNA
ggaggaaagaagaaatcacaaaatatactgaataataagtcagattcccgaacatagacctagaacatatgacgctttaccaaaagaaactctccagata

SEQ ID NO: 15290 - RNA, 100 nt, synthetic construct
  source 1..100: mol_type = other RNA
tttgaaatcatatattatacgatagggcgtaatattagagggccggccccaaatataataactcgaggaaaccctcttgatttctcacccaaaacatccg

SEQ ID NO: 15291 - RNA, 100 nt, synthetic construct
  source 1..100: mol_type = other RNA
gaagtacttaaaaatttaatatgatgctcatcaattataataaaaccactacattgcgagatcaattttaagaagattacgatatgcacccttcgtgatc

SEQ ID NO: 15292 - RNA, 100 nt, synthetic construct
  source 1..100: mol_type = other RNA
gtggaacgaatcaaaatacatttgtacatatataataagtcagattctccaacatagaccttgattaaatgacatcaagtgatatccgacaatcttcgcg

SEQ ID NO: 15293 - RNA, 100 nt, synthetic construct
  source 1..100: mol_type = other RNA
aatgaggggatatatacagacaagagcaagaagtaaatattaaataattagtgtgaatgtctacaacctatgcataaaagaaatccgatggatatgagag

SEQ ID NO: 15294 - RNA, 100 nt, synthetic construct
  source 1..100: mol_type = other RNA
acagaacaaatcaacttgaacgatatagataatacattaaggtgccgcacaaatatagtcctaaaatttcagcccagatggctgagaaaaaatagtcctt

SEQ ID NO: 15295 - RNA, 100 nt, synthetic construct
  source 1..100: mol_type = other RNA
tcagaaataagaatcaagacttatcccgaggatataatagtgtgccaactagaccgcaccaacataacacgcgatagaatatcagaataatatgtagaca

SEQ ID NO: 15296 - RNA, 100 nt, synthetic construct
  source 1..100: mol_type = other RNA
aatgagggaataaaatagcccctggtatgttactaattaagaaataattgatgtgaatgtctgcaacctatgcataaatgaaatacgatgtgattatagt

SEQ ID NO: 15297 - RNA, 100 nt, synthetic construct
  source 1..100: mol_type = other RNA
ttatacgtgcggagtcagattggctataaaaatacattaaagtgccgcatggcaaaaatcatataaaccctagaatggaggcgtagaaaaaatagccatt

SEQ ID NO: 15298 - RNA, 100 nt, synthetic construct
  source 1..100: mol_type = other RNA
tgataaagacgtgaggatctgcaacagatccagtaaatattcactctggcaaaaattataatataacaatcgcataggtacttttacatatgacgatcaa

SEQ ID NO: 15299 - RNA, 100 nt, synthetic construct
  source 1..100: mol_type = other RNA
actagcaataatattcagaatataatatgaggggctgagacaggtggaccattaattattgtcgcatatcaatatatctgaatttttttattaccagaat

SEQ ID NO: 15300 - RNA, 100 nt, synthetic construct
  source 1..100: mol_type = other RNA
gtaagaaaatcaaattatactatagggcttaataatagagggccggccctaaatataataccttgatgaaacgctctcgagttctcagccaaaacattgg

SEQ ID NO: 15301 - RNA, 100 nt, synthetic construct
  source 1..100: mol_type = other RNA
ggatactataatattcacaatataataagagggattgagacaggtggaccattaattattgacgcagcacgcgatagaatatcagaattattaccagaat

SEQ ID NO: 15302 - RNA, 100 nt, synthetic construct
  source 1..100: mol_type = other RNA
gaagtacttaaatatttaatatgatgctcatcaattataataaaaccacttcattattcttatatattttagaggtctcgttcatacaacgtggtatgca

SEQ ID NO: 15303 - RNA, 100 nt, synthetic construct
  source 1..100: mol_type = other RNA
ggctataacagcaatattttagatagtacattcgtagagaagactaacatgtacaaaattaattattgtgactataaaatgttcacagccaaaacattgg

SEQ ID NO: 15304 - RNA, 100 nt, synthetic construct
  source 1..100: mol_type = other RNA
acttggaacaacattcaaaaaattaaaatagcggttaagacaggtggacccttaattactgacgaatatcaatatatcagaatttttattgaagtgggag

SEQ ID NO: 15305 - RNA, 100 nt, synthetic construct
  source 1..100: mol_type = other RNA
attcgatcaaagaagagagcgaacgcagaggacaaatatacagtgacatggatttagtaaagttgcgagatatatacatttttatataaatgacggttcc

SEQ ID NO: 15306 - RNA, 100 nt, synthetic construct
  source 1..100: mol_type = other RNA
ttagaagaattatctacagagcagatcaagatgtaaatattgcataaatccttacctggagactgggaacacggaaataaataagtgtttatacgcagag

SEQ ID NO: 15307 - RNA, 100 nt, synthetic construct
  source 1..100: mol_type = other RNA
gtggaacgaatcaaaatatatttggacagatataataagtcagattccctaacatagacctagaaaatatgacggtctacaaaaaggcactatcccgata

SEQ ID NO: 15308 - RNA, 100 nt, synthetic construct
  source 1..100: mol_type = other RNA
ggcgcaattacaaatttaattccagtaagacaccgctaatcgcggagccaaaatatattattaacataaactgtcaaaattcccaatattgaagtgggag

SEQ ID NO: 15309 - RNA, 100 nt, synthetic construct
  source 1..100: mol_type = other RNA
ggaggacttaggaatttaaagcaacagttccagtaaataatcactctggcaaaaattataatataacaatcgcatagctacttttagatatagcgataaa

SEQ ID NO: 15310 - RNA, 100 nt, synthetic construct
  source 1..100: mol_type = other RNA
gagcaaaaatatataatcaaatattttgaatatccaccccgagaaatattatgccgctagacgggtagcgcagcaattgatatcgggttactacaattct

SEQ ID NO: 15311 - RNA, 100 nt, synthetic construct
  source 1..100: mol_type = other RNA
ccccaaatatcaatctccatatattttcaatatagaatcggcgagaactccgcttgaatccaatagaggttggaataaatattttttatgattagaactg

SEQ ID NO: 15312 - RNA, 100 nt, synthetic construct
  source 1..100: mol_type = other RNA
tgcgtaattaaaaatttgttaagagtaacacgtcgctaatggcggaacgaatatataatcttaaaataggcagtcaatattccacatatttaagttgtag

SEQ ID NO: 15313 - RNA, 100 nt, synthetic construct
  source 1..100: mol_type = other RNA
gtggaagaaaacattcaaaatctaattctagattgcactaatcttaaacattcaaaagaaataatataatacctaccaattctaaggcactagcggtaaa

SEQ ID NO: 15314 - RNA, 100 nt, synthetic construct
  source 1..100: mol_type = other RNA
tttcaaatattaaacaagtaatatttggtctataaaaaaagcgagaattcgggctctatcccattgaggagttataaatatttctgataagcatcaaccc

SEQ ID NO: 15315 - RNA, 100 nt, synthetic construct
  source 1..100: mol_type = other RNA
acagaacaaatcaaaatatacgtttttggtgataatacgtgagattaagtgagccagttttataagaaatacatgcatatactagggtattacattgcgc

SEQ ID NO: 15316 - RNA, 100 nt, synthetic construct
  source 1..100: mol_type = other RNA
gaataaggtagctctatataagacagaagatttaaaaataatgattccctaacatagacctagaaaatatgacggtctccaaaaaggcactctcccgata

SEQ ID NO: 15317 - RNA, 100 nt, synthetic construct
  source 1..100: mol_type = other RNA
acctggaataacatccaaaaaattataagaacgggtaagacagctggacccttaattacggacgaaaatcaatatatcagaatttttattgaactgggag

SEQ ID NO: 15318 - RNA, 100 nt, synthetic construct
  source 1..100: mol_type = other RNA
ttaaatataacgggcatatcaataaagatcgagagtgatggacctaccgacatactcgaatgtctcgaaatatacagagtacccggataaaatgactcac

SEQ ID NO: 15319 - RNA, 100 nt, synthetic construct
  source 1..100: mol_type = other RNA
gcccaaatatgcatcttgaactatttagttaatacattaaggtgccgcaaggaaaaaatcctaatatttcagacgaggtgtctaataaaaaatagtcctt

SEQ ID NO: 15320 - RNA, 100 nt, synthetic construct
  source 1..100: mol_type = other RNA
gctcaaatatgcttcttaaactatttagtcgtttcgacgaatcttaaatattgaaaagacataatataaaacattccaatactaaggcagtaacgttaaa

SEQ ID NO: 15321 - RNA, 100 nt, synthetic construct
  source 1..100: mol_type = other RNA
attataaatccacgtaccaaagttagaacattcgtataggagactaacatatgaaaaattaattattgtgactatataatgctacagattattctcatta

SEQ ID NO: 15322 - RNA, 100 nt, synthetic construct
  source 1..100: mol_type = other RNA
tctcaaataagaatcttgaaatattcggcccgtaaaataacggcctttaaagtattttagtgtgaatgtgacgatataaggatatagatgagtctcatta

SEQ ID NO: 15323 - RNA, 100 nt, synthetic construct
  source 1..100: mol_type = other RNA
ctatacttggataaataccaaaatcgtacagattcgaagaaactttaaatggggattatctataagaaatacattaaaatactaaggccgtatagttgta

SEQ ID NO: 15324 - RNA, 100 nt, synthetic construct
  source 1..100: mol_type = other RNA
cggcaaatatcaatcgtgatatattttcaatacagaataggcgagcactcctcttgaatccaatagaggtgggaataaatatattttatgaatagacatg

SEQ ID NO: 15325 - RNA, 100 nt, synthetic construct
  source 1..100: mol_type = other RNA
gtggaagaaatcaaaatatagttggacagataaaataagtcagattgcctaccatacctaagtcggtcagaagacaaactcaaataaaataccaatgcgc

SEQ ID NO: 15326 - RNA, 100 nt, synthetic construct
  source 1..100: mol_type = other RNA
cacgaaatatcaatcttgaaatatattgaatataaattcaacgagacccagtagcgaatgcatctgagatgcggataagaagcccagatttcgagacatc

SEQ ID NO: 15327 - RNA, 100 nt, synthetic construct
  source 1..100: mol_type = other RNA
gtggtactgatcaaaatatatttggacagatataatctcggcgataactccggctgattcctatagtgctgggaataaatatcgttcatcattaaatgaa

SEQ ID NO: 15328 - RNA, 100 nt, synthetic construct
  source 1..100: mol_type = other RNA
gtggacgaattaattttgtttccgtgagattaaaaaatatatgacctgagcgcaatacgggctcgaaacacaccttaaaaaagacgtaattagaattcaa

SEQ ID NO: 15329 - RNA, 100 nt, synthetic construct
  source 1..100: mol_type = other RNA
cttcggatatatatgtgtttcaacatctgattcaaattacgaaataattattgagaaggtctacaccgtatgcataaaatataggagttaataggatcgt

SEQ ID NO: 15330 - RNA, 100 nt, synthetic construct
  source 1..100: mol_type = other RNA
gcgtaaaaataaatcaacacgatcatagtcttaaaaacactaaaaaaatgaggaacattgacaccattgccttttaatattcccattattttagttcggg

SEQ ID NO: 15331 - RNA, 100 nt, synthetic construct
  source 1..100: mol_type = other RNA
atatacgatccggcgatgatcgaaatcttattaataaagtaacctagtttctaccatcctgaagcatattaatacattagagttagtatataaaattgta

SEQ ID NO: 15332 - RNA, 100 nt, synthetic construct
  source 1..100: mol_type = other RNA
gaataagatagctctatataagacataagatttacaaataatgttcacggcttatatgtatcctatacccagctcaaatagcgccaatccgcccattaca

SEQ ID NO: 15333 - RNA, 100 nt, synthetic construct
  source 1..100: mol_type = other RNA
gttataaattcgcgtatcaaaattttcaggtataatatgtaacaatccgattaaatccgaaatgagagagataatctagtaatagataatagtcatgcac

SEQ ID NO: 15334 - RNA, 100 nt, synthetic construct
  source 1..100: mol_type = other RNA
cctcagatatatatgagtctcaatacctgagtacttataagtgactttacgctcgtggctatataaactccgcataaaatatacgggcaaatagtaacag

SEQ ID NO: 15335 - RNA, 100 nt, synthetic construct
  source 1..100: mol_type = other RNA
gatgaataattatatatagagaacaacatggtgtaaatattgcataaatcgttagattgagactgggaacacggaaaattactaagacagtagcgttaaa

SEQ ID NO: 15336 - RNA, 100 nt, synthetic construct
  source 1..100: mol_type = other RNA
gtggatgaaaacattgaaaaaatactaagaggagtagggaagggtggaccattaattactgacgcatatcaatataatccaaacaggcactcattatata

SEQ ID NO: 15337 - RNA, 100 nt, synthetic construct
  source 1..100: mol_type = other RNA
gtggatgaaaccattgaaataataataacaggggtagaaaaaggtggaccattaattactgacgcatatcaatataactgaatttttttattacgcccct

SEQ ID NO: 15338 - RNA, 100 nt, synthetic construct
  source 1..100: mol_type = other RNA
attggatcaaagaagagatcgcacggagtgcacaaatatacagtgacatggatgtagtaaagttgcaagatatatacattattatatatatgacggttcc

SEQ ID NO: 15339 - RNA, 100 nt, synthetic construct
  source 1..100: mol_type = other RNA
acagaacgaattaaaatatacttgctttggtagaataatccagatttcctgaagcagcccttgaagaaaggggcttaagaacttataaaaaatatgaggc

SEQ ID NO: 15340 - RNA, 12 nt, synthetic construct
  source 1..12: mol_type = other RNA
tatatatatatc

SEQ ID NO: 15341 - RNA, 12 nt, synthetic construct
  source 1..12: mol_type = other RNA
aatactaatatc

SEQ ID NO: 15342 - DNA, 66 bp, synthetic construct
  source 1..66: mol_type = other DNA
attccgtctcaagtaannnnnnnnnnatcatggagacgcactgtttttttcagtgcgtctccatga

What is claimed is:

1. An RNA polynucleotide comprising a construct of Formula I, Formula II, Formula III, Formula IV, or Formula V: [chemical structure]
wherein:
TI is an engineered translation initiation element comprising an IRES-like polynucleotide sequence, wherein the IRES-like polynucleotide sequence comprises the nucleic acid sequence of about or at least about 90%, 95%, 97%, 98%, 99% or 100% identical to SEQ ID NO: 1025-14161 or 14412-15341;
Z1 is an expression sequence encoding a therapeutic product;
Z1_{A} is a first portion of an expression sequence encoding a therapeutic product;
Z1_{B} is a second portion of the expression sequence encoding the therapeutic product;
each L is independently a linker sequence;
A1 and B1 are each independently a sequences capable of circularizing the RNA polynucleotide, or
A1 and B1 each independently comprise a nucleotide derivative capable of joining the 5′ end and the 3′ end via a 3′ to 5′ phosphodiester linkage for circularization of the RNA polynucleotide;
the 5′ intron fragment and the 3′ intron fragment are each a fragment of a group II intron, wherein the 5′ intron fragment is located on the 5′ side of the 3′ intron fragment in the group II intron;
the E1 is a 5′ adjacent exon fragment of the group II intron, which is ≥0 nucleotides in length;
the E2 is a 3′ adjacent exon fragment of the group II intron, which is ≥0 nucleotides in length; and
n is an integer selected from 0 to 2.

2. The RNA polynucleotide of claim 1, further comprising a 5′ homology arm at the 5′ end of the 3′ intron fragment.

3. The RNA polynucleotide of claim 1, further comprising a 3′ homology arm at the 3′ end of the 5′ intron fragment.

4. The RNA polynucleotide of claim 1, further comprising a 5′ homology arm at the 5′ end of the 3′ intron fragment, and a 3′ homology arm at the 3′ end of the 5′ intron fragment.

5. The RNA polynucleotide of any one of claims 1-4, wherein the E1 and the E2 are each independently 0 to 20 nucleotides in length.

6. The RNA polynucleotide of any one of claims 1-5, wherein the 5′ intron fragment and the 3′ intron fragment are obtained by segmenting a group II intron at an unpaired region into two fragments, wherein the unpaired region is preferably selected from a linear region between two adjacent domains of the group II intron and a loop region of a stem-loop structure of domain 4 of the group II intron.

7. An RNA polynucleotide comprising an engineered translation initiation element (TI) comprising an IRES-like polynucleotide sequence, wherein the IRES-like polynucleotide sequence comprises the nucleic acid sequence of about or at least about 90%, 95%, 97%, 98%, 99% or 100% identical to SEQ ID NO: 1025-14161 or 14412-15341.

8. The RNA polynucleotide of any one of claims 1-7, wherein the IRES-like polynucleotide sequence is between 6-12 residues in length.

9. The RNA polynucleotide of any one of claims 1-8, wherein the TI further comprises a second IRES-like polynucleotide sequence.

10. The RNA polynucleotide of claim 9, wherein the second IRES-like polynucleotide sequence comprises the nucleic acid sequence of about or at least about 90%, 95%, 97%, 98%, 99% or 100% identical to SEQ ID NO: 1025-14161 or 14412-15341.

11. The RNA polynucleotide of any one of claims 1-6 and 8-10, wherein each L independently comprises a 5′UTR, 3′UTR, poly-A sequence, poly-A-C sequence, poly-C sequence, poly-U sequence, poly-G sequence, ribosome binding site, aptamer, riboswitch, ribozyme, small RNA binding site, translation regulation element (e.g., a Kozak sequence), protein binding site (e.g., PTBP1 or HUR), non-natural nucleotide, or non-nucleotide chemical-linker.

12. The RNA polynucleotide of any one of claims 1-6 and 8-11, wherein each L is independently about 3 to about 100 nucleotide residues in length.

13. The RNA polynucleotide of any one of claims 1-6 and 8-12, wherein each L independently comprises the nucleic acid sequence of RCC, wherein R is a guanine or an adenine.

14. The RNA polynucleotide of any one of claims 1-13, wherein the RNA polynucleotide is a single stranded RNA polynucleotide.

15. The RNA polynucleotide of any one of claims 1-14, wherein the RNA polynucleotide is a circular RNA polynucleotide.

16. The RNA polynucleotide of any one of claims 1-14, wherein the RNA polynucleotide is a linear RNA polynucleotide.

17. The RNA polynucleotide of any one of claims 1-14 and 16, wherein the RNA polynucleotide is capable of circularizing in the absence of an enzyme.

18. A polypeptide expressed by the RNA polynucleotide of any one of claims 1-17.

19. A DNA vector encoding the RNA polynucleotide of any one of claims 1-17.

20. A cell comprising the RNA polynucleotide of any one of claims 1-17, the polypeptide of claim 18, or the DNA vector of claim 19.

21. A composition comprising the RNA polynucleotide of any one of claims 1-17, the polypeptide of claim 18, the DNA vector of claim 19, or the cell of claim 20, and a pharmaceutically acceptable carrier.

22. A method of making a population of cells comprising contacting the cells of the population with the RNA polynucleotide of any one of claims 1-17, the polypeptide of claim 18, or the DNA vector of claim 19.

23. A method for generating an Internal Ribosome Entry Site (IRES)-like polynucleotide sequence, the method comprising the steps of:
(a) generating a polynucleotide query sequence consisting of X nucleic acid residues in length, wherein X is an integer greater than or equal to 3;
(b) generating X−Y+1 number of overlapping polynucleotide fragment sequences within the polynucleotide query sequence, wherein each polynucleotide fragment sequence consists of Y nucleic acid residues in length, wherein the first position of each polynucleotide fragment sequence is n and the last position of the same polynucleotide fragment sequence is Y+n−1, and wherein n represents each positive integer between 1 and X−Y+1;
(c) determining an enrichment score for each polynucleotide fragment sequence of (b);
(d) determining a numerical score for the polynucleotide query sequence by summing the enrichment scores of each polynucleotide fragment sequence of (c); and
(e) identifying the polynucleotide query sequence as an engineered IRES-like polynucleotide sequence according to a reference value.

24. The method of claim 23, wherein the reference value is calculated according to the following formula:
reference value=(23.75*X)−84.85−Z,
wherein Z represents any number between 1 and 10000 and X represents the length of IRES-like polynucleotide sequence.

25. The method of claim 24, wherein Z represents any number between 50 and 5000.

26. The method of claim 24, wherein Z represents any number between 175 and 2500.

27. The method of claim 24, wherein Z represents any number between 150 and 200.

28. The method of claim 23, wherein the reference value is characteristic of the absence of a therapeutic product expression.

29. The method of claim 23, wherein the reference value is the average score of all of the numerical scores of two or more IRES-like polynucleotide sequences or two or more natural IRES sequence or a combination thereof.

30. The method of claim 23, wherein the reference value is greater than or equal to 0.

31. The method of any one of claims 23-30, wherein X is an integer greater than or equal to 5.

32. The method of any one of claims 23-30, wherein X is an integer greater than or equal to 6.

33. The method of any one of claims 23-32, wherein the overlapping polynucleotide fragment sequences within the polynucleotide query sequence are 5, 6, 7, 8, 9 or 10 nucleic acid residues in length.

34. The method of any one of claims 23-33, wherein the enrichment score for a polynucleotide fragment sequence is determined by:
i) generating a expression plasmid library, wherein each expression plasmid of the library comprises a different polynucleotide fragment sequence and a reporter gene;
ii) contacting a population of cells with the expression plasmid library;
iii) quantifying the expression level of the reporter gene corresponding to each expression plasmid of the expression plasmid library;
iv) dividing the total population of cells into a first population and a second population based on the protein expression levels of iii);
v) determining an enrichment score for the polynucleotide fragment sequence using the following system of equations:
$$\begin{matrix}Score = \frac{{f}_{1} - {f}_{2}}{\sqrt{( \frac{1}{{N}_{1}} + \frac{1}{{N}_{2}} ) P ( 1 - P )}} \\ P = \frac{{N}_{1} {f}_{1} - {N}_{2} {f}_{2}}{{N}_{1} + {N}_{2}}\end{matrix}$$
wherein f₁ is the frequency of the polynucleotide fragment sequence in the first population,
wherein f₂ is the frequency of the same polynucleotide fragment sequence in the second population,
wherein N₁ is the size of the first population, and
wherein N₂ is the size of the second population.

35. The method of claim 34, wherein the first population has a protein expression level in the top 0-10 percent of protein expression levels of the total population and wherein the second population has a protein expression level in the bottom 10-90 percent of the protein expression levels of the total population.

36. The method of claim 34 or 35, wherein the first population has a protein expression level in the top 50.1 percent of protein expression levels of the total population and wherein the second population has a protein expression level in the bottom 49.9 percent of the protein expression levels of the total population.

37. The method of claim 34 or 35, wherein the first population has a protein expression level in the top 10 percent of protein expression levels of the total population and wherein the second population has a protein expression level in the bottom 90 percent of the protein expression levels of the total population.

38. The method of any one of claims 23-37, wherein the polynucleotide fragment sequence is 5 nucleic acid residues in length.

39. The method of claim 38, wherein the polynucleotide fragment sequence is selected from SEQ ID NO: 1-1024 with an enrichment score as shown in Table 1.

40. An RNA polynucleotide comprising an engineered translation initiation element (TI), wherein the TI comprises an Internal Ribosome Entry Site (IRES)-like polynucleotide sequence generated by the method of any one of claims 23-39.

41. A polypeptide expressed by the RNA polynucleotide of claim 40.

42. A DNA vector encoding the RNA polynucleotide of claim 40.

43. A cell comprising the RNA polynucleotide of claim 40, the polypeptide of claim 41, or the DNA vector of claim 42.

44. A composition comprising the RNA polynucleotide of claim 40, the polypeptide of claim 41, the DNA vector of claim 42, or the cell of claim 43, and a pharmaceutically acceptable carrier.

45. A method of making a population of cells comprising contacting the cells of the population with the RNA polynucleotide of claim 40, the polypeptide of claim 41, or the DNA vector of claim 42.

46. A method of modulating the expression of a protein in a subject in need thereof, comprising administering to the subject a therapeutically effective amount of the polynucleotide of any one of claims 1-17 and 40, the polypeptide of claim 18 or 41, the DNA vector of claim 19 or 42, or the cell of claim 20 or 43.

47. A method of treating or preventing a disease or disorder in a subject in need thereof, comprising administering to the subject a therapeutically effective amount of the polynucleotide of any one of claims 1-17 and 40, the polypeptide of claim 18 or 41, the DNA vector of claim 19 or 42, or the cell of claim 20 or 43.

48. Use of the polynucleotide of any one of claims 1-17 and 40, the polypeptide of claim 18 or 41, the DNA vector of claim 19 or 42, or the cell of claim 20 or 43 in the manufacture of a medicament for modulating the expression of a protein or treating or preventing a disease or disorder in a subject in need thereof.

49. A polynucleotide according to any one of claims 1-17 and 40, the polypeptide of claim 18 or 41, the DNA vector of claim 19 or 42, or the cell of claim 20 or 43, for modulating the expression of a protein or treating or preventing a disease or disorder in a subject in need thereof.
